(19) United States
(12) Patent Application Publication
(10) Pub. No.: US 2023/0357735 A1
(43) Pub. Date: Nov. 9, 2023

(54) PROGRAMMABLE NUCLEASES AND METHODS OF USE

(71) Applicant: Mammoth Biosciences, Inc., Brisbane, CA (US)

(72) Inventors: Lucas Benjamin HARRINGTON, San Francisco, CA (US); William Douglass WRIGHT, Fairfield, CA (US); Pei-Qi LIU, Oakland, CA (US); Benjamin Julius RAUCH, Oakland, CA (US); Wiputra Jaya HARTONO, San Francisco, CA (US); Bridget Ann Paine MCKAY, Portola Valley, CA (US); Danuta Sastre PHIPPS, San Mateo, CA (US); Yuxuan ZHENG, San Jose, CA (US); Nerea SANVISENS, San Francisco, CA (US); Sean CHEN, Berkeley, CA (US); David PAEZ-ESPINO, Concord, CA (US)

(21) Appl. No.: 18/000,640

(22) PCT Filed: Jun. 3, 2021
(86) PCT No.: PCT/US21/35781

§ 371 Date: Dec. 2, 2022

Related U.S. Application Data
(60) Provisional application No. 63/034,346, filed on Jun. 3, 2020.
(60) Provisional application No. 63/037,535, filed on Jun. 10, 2020.
(60) Provisional application No. 63/040,998, filed on Jun. 18, 2020.
(60) Provisional application No. 63/092,481, filed on Oct. 15, 2020.
(60) Provisional application No. 63/116,083, filed on Nov. 19, 2020.
(60) Provisional application No. 63/124,676, filed on Dec. 11, 2020.
(60) Provisional application No. 63/156,883, filed on Mar. 4, 2021.
(60) Provisional application No. 63/178,472, filed on Apr. 22, 2021.

(51) Int. Cl. C12N 9/22; C12N 15/11; C12N 15/90; C12Q 1/6897

(52) U.S. Cl. CPC C12N 9/22; C12N 15/11; C12N 15/907; C12Q 1/6897; C12N 2310/20; C12N 2800/80

(57) ABSTRACT

Provided herein, in certain embodiments, are programmable nucleases, guide nucleic acids, and complexes thereof. Certain programmable nucleases provided herein comprise a RuvC domain. Also provided herein are nucleic acids encoding said programmable nucleases and guide nucleic acids. Also provided herein are methods of genome editing, methods of regulating gene expression, and methods of detecting nucleic acids with said programmable nucleases and guide nucleic acids.

### CROSS-REFERENCE

[0001] The present application claims priority to and benefit from U.S. Provisional Application No. 63/034,346, filed on Jun. 3, 2020, U.S. Provisional Application No. 63/037,535, filed on Jun. 10, 2020, U.S. Provisional Application No. 63/040,998, filed on Jun. 18, 2020, U.S. Provisional Application No. 63/092,481, filed on Oct. 15, 2020, U.S. Provisional Application No. 63/116,083, filed on Nov. 19, 2020, U.S. Provisional Application No. 63/124,676, filed on Dec. 11, 2020, U.S. Provisional Application No. 63/156,883, filed on Mar. 4, 2021, and U.S. Provisional Application No. 63/178,472, filed on Apr. 22, 2021, the entire contents of each of which are herein incorporated by reference.

### BACKGROUND

[0002] Certain programmable nucleases can be used for genome editing of nucleic acid sequences or detection of nucleic acid sequences. There is a need for high efficiency, programmable nucleases that are capable of working under various sample conditions and can be used for both genome editing and diagnostics.

### SUMMARY

[0003] In various aspects, the present disclosure provides a composition comprising: a) a programmable CasΦ nuclease or a nucleic acid encoding said programmable CasΦ nuclease, wherein said programmable CasΦ nuclease comprises at least 85% sequence identity to a sequence selected from the group consisting of SEQ ID NOs: 1 to 47, SEQ ID NO. 105, and SEQ ID NO. 107, and b) a guide nucleic acid or a nucleic acid encoding said guide nucleic acid, wherein said guide nucleic acid comprises a region comprising a nucleotide sequence that is complementary to a target nucleic acid sequence and an additional region, wherein said region and said additional region are heterologous to each other.

[0004] In some aspects, the additional region of the guide nucleic acid comprises at least 85% sequence identity to a sequence selected from the group consisting of SEQ ID NOs: 48 to 86. In some aspects, the guide nucleic acid comprises a sequence comprising at least 95% sequence identity to a sequence selected from the group consisting of SEQ ID NOs: 48 to 86. In some aspects, the guide nucleic acid comprises a sequence selected from the group consisting of SEQ ID NOs: 48 to 86. In some aspects, the programmable CasΦ nuclease comprises nickase activity. In some aspects, the programmable CasΦ nuclease comprises double-strand cleavage activity. In some aspects, the programmable CasΦ nuclease comprises at least 90% sequence identity to a sequence selected from the group consisting of SEQ ID NOs: 1 to 47, SEQ ID NO. 105, and SEQ ID NO. 107.

[0005] In some aspects, the programmable CasΦ nuclease comprises at least 95% sequence identity to a sequence selected from the group consisting of SEQ ID NOs: 1 to 47, SEQ ID NO. 105, and SEQ ID NO. 107. In some aspects, the programmable CasΦ nuclease comprises at least 98% sequence identity to a sequence selected from the group consisting of SEQ ID NOs: 1 to 47, SEQ ID NO. 105, and SEQ ID NO. 107. In some aspects, the programmable CasΦ nuclease comprises a sequence selected from the group consisting of SEQ ID NOs: 1 to 47, SEQ ID NO. 105, and SEQ ID NO. 107. In some aspects, the guide nucleic acid does not comprise a tracrRNA. In some aspects, the programmable CasΦ nuclease does not require a tracrRNA. In some aspects, the programmable CasΦ nuclease comprises greater nickase activity when complexed with the guide nucleic acid at a temperature from about 20° C. to about 25° C., as compared with complex formation at a temperature of about 37° C. In some aspects, the guide nucleic acid comprises at least 98% sequence identity to SEQ ID NO: 54. In some aspects, the guide nucleic acid comprises at least 98% sequence identity to SEQ ID NO: 57. In some aspects, the programmable CasΦ nuclease comprises greater nickase activity when complexed with the guide nucleic acid comprising a sequence comprising at least 98% sequence identity to SEQ ID NO: 57, as compared to when complexed with a guide nucleic acid comprising SEQ ID NO: 49.

[0006] In some aspects, the programmable CasΦ nuclease exhibits greater nicking activity as compared to double stranded cleavage activity. In some aspects, the programmable CasΦ nuclease exhibits greater double stranded cleavage activity as compared to nicking activity. In some aspects, the programmable CasΦ nuclease comprises a single active site in a RuvC domain that is capable of catalyzing pre-crRNA processing and nicking or cleaving of nucleic acids. In some aspects, the programmable CasΦ nuclease recognizes a protospacer adjacent motif (PAM) of 5′-TBN-3′, wherein B is one or more of C, G, or, T. In some aspects, the programmable CasΦ nuclease recognizes a protospacer adjacent motif (PAM) of 5′-TTTN-3′.

[0007] In various aspects, the present disclosure provides a method of modifying a target nucleic acid sequence, the method comprising: contacting a target nucleic acid sequence with a programmable CasΦ nuclease comprising at least 85% sequence identity to a sequence selected from the group consisting of SEQ ID NOs: 1 to 47, SEQ ID NO. 105, and SEQ ID NO. 107, and a guide nucleic acid, wherein the programmable CasΦ nuclease cleaves the target nucleic acid sequence, thereby modifying the target nucleic acid sequence.

[0008] In some aspects, the programmable CasΦ nuclease introduces a double-stranded break in the target nucleic acid sequence. In some aspects, the programmable CasΦ nuclease comprises double-strand cleavage activity. In some aspects, the programmable CasΦ nuclease cleaves a single-strand of the target nucleic acid sequence. In some aspects, the programmable CasΦ nuclease comprises nickase activity. In some aspects, the programmable CasΦ nuclease exhibits greater nicking activity as compared to double stranded cleavage activity. In some aspects, the programmable CasΦ nuclease exhibits greater double stranded cleavage activity as compared to nicking activity. In some aspects, the target nucleic acid is DNA. In some aspects, the target nucleic acid is double-stranded DNA. In some aspects, the programmable CasΦ nuclease cleaves a non-target strand of the double-stranded DNA, wherein the non-target strand is non-complementary to the guide nucleic acid. In some aspects, the programmable CasΦ nuclease does not cleave a target strand of the double-stranded DNA, wherein the target strand is complementary to the guide nucleic acid.

[0009] In some aspects, the programmable CasΦ nuclease comprises at least 90% sequence identity to a sequence selected from the group consisting of SEQ ID NOs: 1 to 47, SEQ ID NO. 105, and SEQ ID NO. 107. In some aspects, the programmable CasΦ nuclease comprises at least 95% sequence identity to a sequence selected from the group consisting of SEQ ID NOs: 1 to 47, SEQ ID NO. 105, and SEQ ID NO. 107. In some aspects, the programmable CasΦ nuclease comprises at least 98% sequence identity to a sequence selected from the group consisting of SEQ ID NOs: 1 to 47, SEQ ID NO. 105, and SEQ ID NO. 107. In some aspects, the programmable CasΦ nuclease comprises a sequence selected from the group consisting of SEQ ID NOs: 1 to 47, SEQ ID NO. 105, and SEQ ID NO. 107. In some aspects, the guide nucleic acid comprises a sequence comprising at least 85% sequence identity to a sequence selected from the group consisting of SEQ ID NOs: 48 to 86. In some aspects, the guide nucleic acid comprises a sequence comprising at least 95% sequence identity to a sequence selected from the group consisting of SEQ ID NOs: 48 to 86. In some aspects, the guide nucleic acid comprises a sequence selected from the group consisting of SEQ ID NOs: 48 to 86.

[0010] In some aspects, the guide nucleic acid does not comprise a tracrRNA. In some aspects, the target nucleic acid sequence comprises a mutated sequence or a sequence associated with a disease. In some aspects, the mutated sequence is removed after the programmable CasΦ nuclease cleaves the target nucleic acid sequence. In some aspects, the target nucleic acid sequence is in a human cell. In some aspects, the method is performed in vivo. In some aspects, the method is performed ex vivo. In some aspects, the method further comprises inserting a donor polynucleotide into the target nucleic acid sequence at the site of cleavage.

[0011] In various aspects, the present disclosure provides a method of introducing a break in a target nucleic acid, the method comprising: contacting the target nucleic acid with: (a) a first guide nucleic acid comprising a region that binds to a first programmable nickase comprising at least 85% sequence identity to a sequence selected from the group consisting of SEQ ID NOs: 1 to 47, SEQ ID NO. 105, and SEQ ID NO. 107; and (b) a second guide nucleic acid comprising a region that binds to a second programmable nickase comprising at least 85% sequence identity to a sequence selected from the group consisting of SEQ ID NOs: 1 to 47, SEQ ID NO. 105, and SEQ ID NO. 107, wherein the first guide nucleic acid comprises a first additional region that binds to the target nucleic acid and wherein the second guide nucleic acid comprises a second additional region that binds to the target nucleic acid and wherein the first additional region of the first guide nucleic acid and the second additional region of the second guide nucleic acid bind opposing strands of the target nucleic acid. In some aspects, the first programmable nickase, the second programmable nickase, or both comprise at least 90% sequence identity to a sequence selected from the group consisting of SEQ ID NOs: 1 to 47, SEQ ID NO. 105, and SEQ ID NO. 107.

[0012] In some aspects, the first programmable nickase, the second programmable nickase, or both comprise at least 95% sequence identity to a sequence selected from the group consisting of SEQ ID NOs: 1 to 47, SEQ ID NO. 105, and SEQ ID NO. 107. In some aspects, the first programmable nickase, the second programmable nickase, or both comprise a sequence selected from the group consisting of SEQ ID NOs: 1 to 47, SEQ ID NO. 105, and SEQ ID NO. 107. In some aspects, the first guide nucleic acid, the second guide nucleic acid, or both comprise a sequence comprising at least 85% sequence identity to a sequence selected from the group consisting of SEQ ID NOs: 48 to 86. In some aspects, the first guide nucleic acid, the second guide nucleic acid, or both comprise a sequence comprising at least 95% sequence identity to a sequence selected from the group consisting of SEQ ID NOs: 48 to 86. In some aspects, the first guide nucleic acid, the second guide nucleic acid, or both comprise a sequence selected from the group consisting of SEQ ID NOs: 48 to 86.

[0013] In some aspects, the first programmable nickase and the second programmable nickase exhibit greater nicking activity as compared to double stranded cleavage activity. In some aspects, the first programmable nickase and the second programmable nickase nick the target nucleic acid at two different sites. In some aspects, the target nucleic acid comprises double stranded DNA. In some aspects, the two different sites are on opposing strands of the double stranded DNA. In some aspects, the target nucleic acid comprises a mutated sequence or a sequence is associated with a disease. In some aspects, the mutated sequence is removed after the first programmable nickase and the second programmable nickase nick the target nucleic acid. In some aspects, the target nucleic acid is in a cell. In some aspects, the method is performed in vivo. In some aspects, the method is performed ex vivo. In some aspects, the first programmable nickase and the second programmable nickase are the same. In some aspects, the first programmable nickase and the second programmable nickase are different.

[0014] In various aspects, the present disclosure provides a method of detecting a target nucleic acid in a sample, the method comprising contacting a sample comprising a target nucleic acid with (a) a programmable CasΦ nuclease comprising at least 85% sequence identity to a sequence selected from the group consisting of SEQ ID NOs: 1 to 47, SEQ ID NO. 105, and SEQ ID NO. 107; (b) a guide RNA comprising a region that binds to the programmable CasΦ nuclease and an additional region that binds to the target nucleic acid; and (c) a labeled single stranded DNA reporter that does not bind the guide RNA; cleaving the labeled single stranded DNA reporter by the programmable CasΦ nuclease to release a detectable label; and detecting the target nucleic acid by measuring a signal from the detectable label.

[0015] In some aspects, the target nucleic acid is single stranded DNA. In some aspects, the target nucleic acid is double stranded DNA. In some aspects, the target nucleic acid is a viral nucleic acid. In some aspects, the target nucleic acid is bacterial nucleic acid. In some aspects, the target nucleic acid is from a human cell. In some aspects, the target nucleic acid is a fetal nucleic acid. In some aspects, the sample is derived from a subject's saliva, blood, serum, plasma, urine, aspirate, or biopsy sample. In some aspects, the programmable CasΦ nuclease comprises at least 95% sequence identity to a sequence selected from the group consisting of SEQ ID NOs: 1 to 47, SEQ ID NO. 105, and SEQ ID NO. 107. In some aspects, the programmable CasΦ nuclease comprises a sequence selected from the group consisting of SEQ ID NOs: 1 to 47, SEQ ID NO. 105, and SEQ ID NO. 107.

[0016] In some aspects, the guide RNA comprises at least about 95% sequence identity to a sequence selected from the group consisting of SEQ ID NOs: 48 to 86. In some aspects, the guide RNA comprises a sequence selected from the group consisting of SEQ ID NOs: 48 to 86. In some aspects, the sample comprises a phosphate buffer, a Tris buffer, or a HEPES buffer. In some aspects, the sample comprises a pH of 7 to 9. In some aspects, the sample comprises a pH of 7.5 to 8. In some aspects, the sample comprises a salt concentration of 25 nM to 200 mM. In some aspects, the single stranded DNA reporter comprises an ssDNA-fluorescence quenching DNA reporter. In some aspects, the ssDNA-fluorescence quenching DNA reporter is a universal ssDNA-fluorescence quenching DNA reporter. In some aspects, the programmable CasΦ nuclease exhibits PAM-independent cleaving.

[0017] In various aspects, the present disclosure provides a method of modulating transcription of a gene in a cell, the method comprising: introducing into a cell comprising a target nucleic acid sequence: (i) a fusion polypeptide or a nucleic acid encoding the fusion polypeptide, wherein the fusion polypeptide comprises: (a) a dCasΦ polypeptide comprising at least 85% sequence identity to a sequence selected from the group consisting of SEQ ID NOs: 1 to 47, SEQ ID NO. 105, and SEQ ID NO. 107, wherein the dCasΦ polypeptide is enzymatically inactive; and (b) a polypeptide comprising transcriptional regulation activity; and (ii) a guide nucleic acid, or a nucleic acid comprising a nucleotide sequence encoding the guide nucleic acid, wherein the guide nucleic acid comprises a region that binds to the dCasΦ polypeptide and an additional region that binds to the target nucleic acid; wherein transcription of the gene is modulated through the fusion polypeptide acting on the target nucleic acid sequence.

[0018] In some aspects, the dCasΦ polypeptide comprises at least 95% sequence identity to a sequence selected from the group consisting of SEQ ID NOs: 1 to 47, SEQ ID NO. 105, and SEQ ID NO. 107. In some aspects, the guide nucleic acid comprises at least about 95% sequence identity to a sequence selected from the group consisting of SEQ ID NOs: 48 to 86. In some aspects, the guide nucleic acid comprises a sequence selected from the group consisting of SEQ ID NOs: 48 to 86. In some aspects, the guide nucleic acid comprises a sequence selected from the group consisting of SEQ ID NOs: 48 to 86. In some aspects, the polypeptide comprising transcriptional regulation activity polypeptide comprises transcription activation activity.

[0019] In some aspects, the polypeptide comprising transcriptional regulation activity polypeptide comprises transcription repressor activity. In some aspects, the polypeptide comprising transcriptional regulation activity polypeptide comprises an activity selected from the group consisting of transcription activation activity, transcription repression activity, nuclease activity, transcription release factor activity, histone modification activity, histone acetyltransferase activity, nucleic acid association activity, DNA methylase activity, direct or indirect DNA demethylase activity, methyltransferase activity, demethylase activity, acetyltransferase activity, deacetylase activity, kinase activity, phosphatase activity, ubiquitin ligase activity, deubiquitinating activity, adenylation activity, deadenylation activity, deaminase activity, SUMOylating activity, deSUMOylating activity, ribosylation activity, deribosylation activity, myristoylation activity, and demyristoylation activity.

[0020] In various aspects, the present disclosure provides a composition comprising: a) a Cas nuclease or nucleic acid encoding said Cas nuclease, and b) a guide nucleic acid or a nucleic acid encoding said guide nucleic acid, wherein said guide nucleic acid comprises a region comprising a nucleotide sequence that is complementary to a target nucleic acid sequence and an additional region, wherein said region and said additional region are heterologous to each other; wherein the Cas nuclease comprises a RuvC domain, wherein the RuvC domain is capable of processing a pre-crRNA and cleaving a target nucleic acid. In some aspects, the same active site in the RuvC domain catalyzes the processing of the pre-crRNA and the cleaving of the target nucleic acid. In some aspects, the Cas nuclease is the programmable CasΦ nuclease as disclosed herein. In some aspects, the Cas nuclease recognizes a protospacer adjacent motif (PAM) of 5′-TBN-3′, wherein B is one or more of C, G, or, T. In some aspects, the Cas nuclease recognizes a protospacer adjacent motif (PAM) of 5′-TTTN-3′. In some aspects, the Cas nuclease recognizes a protospacer adjacent motif (PAM) of 5′-TTN-3′. In some aspects, the Cas nuclease recognizes a protospacer adjacent motif (PAM) of 5′-GTTB-3′, wherein B is C, G, or T. In some aspects, the Cas nuclease recognizes a protospacer adjacent motif (PAM) of 5′-GTTK-3′, 5′-VTTK-3′, 5′-VTTS-3′, 5′-TTTS-3′ or 5′-VTTN-3′, where K is G or T, V is A, C or G, and S is C or G. In some aspects, the composition is used in any of the above methods.

[0021] In various aspects, the present disclosure provides the use of a programmable CasΦ nuclease to modify a target nucleic acid sequence according to any one of the above methods. In various aspects, the present disclosure provides the use of a first programmable nickase and a second programmable nickase to introduce a break in a target nucleic acid according to any one of the above methods. In various aspects, the present disclosure provides the use of a programmable CasΦ nuclease to detect a target nucleic acid in a sample according to any one of the above methods. In various aspects, the present disclosure provides the use of a dCasΦ polypeptide to modulate transcription of a gene in a cell according to any one of the above methods. In some aspects, the region is a spacer region and the additional region is a repeat region. In some aspects, the region is a repeat region and the additional region is a spacer region. In some aspects, the repeat region comprises a GAC sequence, optionally wherein the GAC sequence is at the 3′ end of the repeat region. In some aspects, the repeat region comprises a hairpin, optionally wherein the hairpin is in the 3′ portion of the repeat region. In some aspects, the hairpin comprises a double-stranded stem portion and a single-stranded loop portion. In some aspects, a strand of the stem portion comprises a CYC sequence and the other strand of the stem portion comprises a GRG sequence, wherein Y and R are complementary. In some aspects, the G of the GAC sequence is in the stem portion of the hairpin. In some aspects, each strand of the stem portion comprises 3, 4 or 5 nucleotides. In some aspects, the loop portion comprises between 2 and 8 nucleotides, optionally wherein the loop portion comprises 4 nucleotides. In some aspects, the guide nucleic acid comprises at least 98% sequence identity to SEQ ID NO: 54.

[0022] In some aspects, the repeat region is between 15 and 50 nucleotides in length, preferably, wherein the repeat region is between 19 and 37 nucleotides in length. In some aspects, the spacer region is between 15 and 50 nucleotides in length, between 15 and 40 nucleotides in length, or between 15 and 35 nucleotides in length, preferably wherein the spacer region is between 16 and 30 nucleotides in length. In some aspects, the spacer region is between 16 and 20 nucleotides in length. In some aspects, the programmable CasΦ nuclease forms a complex with a divalent metal ion, preferably wherein the divalent metal ion is Mg2+.

[0023] In various aspects, the present disclosure provides a programmable CasΦ nuclease or a nucleic acid encoding said programmable CasΦ nuclease, wherein said programmable CasΦ nuclease comprises at least 85% sequence identity to a sequence selected from the group consisting of SEQ ID NOs: 1 to 47, SEQ ID NO. 105, and SEQ ID NO. 107, and wherein the programmable CasΦ nuclease is capable of binding to a guide RNA comprising a first region that is complementary to a target nucleic acid sequence in a eukaryotic genome and a second region that binds to the programmable CasΦ nuclease; a complex comprising the programmable CasΦ nuclease and the guide RNA binds to the target sequence; the programmable CasΦ nuclease comprises a RuvC domain, wherein the RuvC domain is capable of processing a pre-crRNA and cleaving the target nucleic acid; and the programmable CasΦ nuclease does not require a tracrRNA to cleave the target nucleic acid.

[0024] In various aspects, the present disclosure provides a programmable CasΦ nuclease or a nucleic acid encoding said programmable CasΦ nuclease, wherein said programmable CasΦ nuclease comprises a RuvC-like domain which matches PFAM family PF07282 and does not match PFAM family PF18516, and wherein the programmable CasΦ nuclease is capable of binding to a guide RNA comprising a first region that is complementary to a target nucleic acid sequence in a eukaryotic genome and a second region that binds to the programmable CasΦ nuclease; a complex comprising the programmable CasΦ nuclease and the guide RNA binds to the target sequence; the RuvC-like domain is capable of processing a pre-crRNA and cleaving the target nucleic acid; and the programmable CasΦ nuclease does not require a tracrRNA to cleave the target nucleic acid.

[0025] In various aspects, the present disclosure provides a programmable CasΦ nuclease or a nucleic acid encoding said programmable CasΦ nuclease, wherein said programmable CasΦ nuclease comprises at least 85% sequence identity to a sequence selected from the group consisting of SEQ ID NOs: 1 to 47, SEQ ID NO. 105, or SEQ ID NO. 107, and wherein a) the programmable CasΦ nuclease comprises a RuvC-like domain which matches PFAM family PF07282 and does not match PFAM family PF18516; b) the programmable CasΦ nuclease is capable of binding to a guide RNA comprising a first region that is complementary to a target nucleic acid sequence in a eukaryotic genome and a second region that binds to the programmable CasΦ nuclease; c) a complex comprising the programmable CasΦ nuclease and the guide RNA binds to the target sequence; d) the RuvC-like domain is capable of processing a pre-crRNA and cleaving the target nucleic acid; and e) the programmable CasΦ nuclease does not require a tracrRNA to cleave the target nucleic acid.

[0026] In some aspects, the same active site in the RuvC domain or RuvC-like domain catalyzes the processing of the pre-crRNA and the cleaving of the target nucleic acid. In some aspects, the programmable CasΦ nuclease is fused or linked to one or more NLS. In some aspects, the one or more NLS are fused or linked to the N-terminus of the programmable CasΦ nuclease; the one or more NLS are fused or linked to the C-terminus of the programmable CasΦ nuclease; or the one or more NLS are fused or linked to the N-terminus and the C-terminus of the programmable CasΦ nuclease. In some cases, an aspect comprises the programmable CasΦ nuclease or a nucleic acid described herein and a gRNA comprising a first region that is complementary to a target nucleic acid sequence in a eukaryotic genome and a second region that binds to the programmable CasΦ nuclease.

[0027] In some cases, an aspect comprises the programmable CasΦ nuclease or a nucleic acid described herein and a cell, preferably wherein the cell is a eukaryotic cell. In some cases, an aspect comprises the programmable CasΦ nuclease or a nucleic acid described herein and a gRNA comprising a first region that is complementary to a target nucleic acid sequence in a eukaryotic genome and a second region that binds to the programmable CasΦ nuclease and a cell, preferably wherein the cell is a eukaryotic cell. In some cases, an aspect comprises a eukaryotic cell comprising the programmable CasΦ nuclease or a nucleic acid described herein.

[0028] In some aspects, the cell further comprises a gRNA comprising a first region that is complementary to a target nucleic acid sequence in a eukaryotic genome and a second region that binds to the programmable CasΦ nuclease and a cell, preferably wherein the cell is a eukaryotic cell.

[0029] In some cases, an aspect comprises a vector comprising a nucleic acid described herein. In some aspects, the vector is a viral vector.

[0030] In some aspects, the programmable CasΦ nuclease recognizes a protospacer adjacent motif (PAM) of 5′-TTN-3′. In some aspects, the programmable CasΦ nuclease recognizes a protospacer adjacent motif (PAM) of 5′-GTTB-3′, wherein B is C, G, or T. In some aspects, the Cas nuclease recognizes a protospacer adjacent motif (PAM) of 5′-TTN-3′, optionally wherein the PAM is 5′-TTN-3′. In some aspects, the Cas nuclease recognizes a protospacer adjacent motif (PAM) of 5′-GTTK-3′, 5′-VTTK-3′, 5′-VTTS-3′, 5′-TTTS-3′ or 5′-VTTN-3′, where K is G or T, V is A, C or G, and S is C or G. In some aspects, the Cas nuclease recognizes a protospacer adjacent motif (PAM) of 5′-GTTB-3′, wherein B is C, G, or T.

[0031] In various aspects, the present disclosure provides a programmable CasΦ nuclease or a nucleic acid encoding said programmable CasΦ nuclease, wherein said programmable CasΦ nuclease comprises at least 85% sequence identity to a sequence selected from the group consisting of SEQ ID NOs: 1 to 47, SEQ ID NO. 105, and SEQ ID NO. 107, and wherein the programmable CasΦ nuclease is capable of binding to a guide RNA comprising a first region that is complementary to a target nucleic acid sequence in a eukaryotic genome and a second region that binds to the programmable CasΦ nuclease; a complex comprising the programmable CasΦ nuclease and the guide RNA binds to the target sequence; the programmable CasΦ nuclease comprises a RuvC domain, wherein the RuvC domain is capable of processing a pre-crRNA and cleaving the target nucleic acid; the programmable CasΦ nuclease cleaves both strands of the target nucleic acid comprising the target sequence, wherein the strand break is a staggered cut with a 5′ overhang; and the programmable CasΦ nuclease does not require a tracrRNA to cleave the target nucleic acid.

[0032] In various aspects, the present disclosure provides a programmable CasΦ nuclease or a nucleic acid encoding said programmable CasΦ nuclease, wherein said programmable CasΦ nuclease comprises a RuvC-like domain which matches PFAM family PF07282 and does not match PFAM family PF18516, and wherein the programmable CasΦ nuclease is capable of binding to a guide RNA comprising a first region that is complementary to a target nucleic acid sequence in a eukaryotic genome and a second region that binds to the programmable CasΦ nuclease; a complex comprising the programmable CasΦ nuclease and the guide RNA binds to the target sequence; the RuvC-like domain is capable of processing a pre-crRNA and cleaving the target nucleic acid; the programmable CasΦ nuclease cleaves both strands of the target nucleic acid comprising the target sequence, wherein the strand break is a staggered cut with a 5′ overhang; and the programmable CasΦ nuclease does not require a tracrRNA to cleave the target nucleic acid.

[0033] In various aspects, the present disclosure provides a programmable nuclease or a nucleic acid encoding said programmable nuclease, wherein said programmable nuclease is a Type V CRISPR/Cas enzyme nuclease and comprises between 400 and 900 amino acids, and wherein the programmable CasΦ nuclease is capable of binding to a guide RNA comprising a first region that is complementary to a target nucleic acid sequence in a eukaryotic genome and a second region that binds to the programmable CasΦ nuclease; a complex comprising the programmable CasΦ nuclease and the guide RNA binds to the target sequence; the programmable CasΦ nuclease comprises a RuvC domain, wherein the RuvC domain is capable of processing a pre-crRNA and cleaving the target nucleic acid; the programmable CasΦ nuclease cleaves both strands of the target nucleic acid comprising the target sequence, wherein the strand break is a staggered cut with a 5′ overhang; and the programmable CasΦ nuclease does not require a tracrRNA to cleave the target nucleic acid.

[0034] In various aspects, the present disclosure provides a programmable CasΦ nuclease or a nucleic acid encoding said programmable CasΦ nuclease, wherein said programmable CasΦ nuclease comprises at least 85% sequence identity to a sequence selected from the group consisting of SEQ ID NOs: 1 to 47, SEQ ID NO. 105, and SEQ ID NO. 107, and wherein the programmable CasΦ nuclease is capable of binding to a guide RNA comprising a first region that is complementary to a target nucleic acid sequence in a eukaryotic genome and a second region that binds to the programmable CasΦ nuclease; a complex comprising the programmable CasΦ nuclease and the guide RNA binds to the target sequence; the programmable CasΦ nuclease comprises a RuvC domain, wherein the RuvC domain is capable of processing a pre-crRNA and cleaving the target nucleic acid; the programmable CasΦ nuclease is capable of cleaving the second region of the guide RNA in mammalian cells; and the programmable CasΦ nuclease does not require a tracrRNA to cleave the target nucleic acid.

[0035] In various aspects, the present disclosure provides a programmable CasΦ nuclease or a nucleic acid encoding said programmable CasΦ nuclease, wherein said programmable CasΦ nuclease comprises a RuvC-like domain which matches PFAM family PF07282 and does not match PFAM family PF18516, and wherein the programmable CasΦ nuclease is capable of binding to a guide RNA comprising a first region that is complementary to a target nucleic acid sequence in a eukaryotic genome and a second region that binds to the programmable CasΦ nuclease; a complex comprising the programmable CasΦ nuclease and the guide RNA binds to the target sequence; the RuvC-like domain is capable of processing a pre-crRNA and cleaving the target nucleic acid; the programmable CasΦ nuclease is capable of cleaving the second region of the guide RNA in mammalian cells; and the programmable CasΦ nuclease does not require a tracrRNA to cleave the target nucleic acid.

[0036] In various aspects, the present disclosure provides a programmable nuclease or a nucleic acid encoding said programmable nuclease, wherein said programmable nuclease is a Type V CRISPR/Cas enzyme nuclease and comprises between 400 and 900 amino acids, and wherein the programmable CasΦ nuclease is capable of binding to a guide RNA comprising a first region that is complementary to a target nucleic acid sequence in a eukaryotic genome and a second region that binds to the programmable CasΦ nuclease; a complex comprising the programmable CasΦ nuclease and the guide RNA binds to the target sequence; the RuvC-like domain is capable of processing a pre-crRNA and cleaving the target nucleic acid; the programmable CasΦ nuclease is capable of cleaving the second region of the guide RNA in mammalian cells; and the programmable CasΦ nuclease does not require a tracrRNA to cleave the target nucleic acid.

[0037] In various aspects, the present disclosure provides a programmable CasΦ nuclease or a nucleic acid encoding said programmable CasΦ nuclease, wherein said programmable CasΦ nuclease comprises at least 85% sequence identity to a sequence selected from the group consisting of SEQ ID NOs: 1 to 47, SEQ ID NO. 105, and SEQ ID NO. 107, and wherein the programmable CasΦ nuclease is capable of binding to a guide RNA comprising a first region that is complementary to a target nucleic acid sequence in a eukaryotic genome and a second region that binds to the programmable CasΦ nuclease; a complex comprising the programmable CasΦ nuclease and the guide RNA binds to the target sequence; the programmable CasΦ nuclease comprises a RuvC domain, wherein the RuvC domain is capable of processing a pre-crRNA and cleaving the target nucleic acid; the programmable CasΦ nuclease cleaves both strands of a target nucleic acid comprising the target sequence, wherein the strand break is a staggered cut with a 5′ overhang; the programmable CasΦ nuclease is capable of cleaving the second region of the guide RNA in mammalian cells; and the programmable CasΦ nuclease does not require a tracrRNA to cleave the target nucleic acid.

[0038] In various aspects, the present disclosure provides a programmable CasΦ nuclease or a nucleic acid encoding said programmable CasΦ nuclease, wherein said programmable CasΦ nuclease comprises a RuvC-like domain which matches PFAM family PF07282 and does not match PFAM family PF18516, and wherein the programmable CasΦ nuclease is capable of binding to a guide RNA comprising a first region that is complementary to a target nucleic acid sequence in a eukaryotic genome and a second region that binds to the programmable CasΦ nuclease; a complex comprising the programmable CasΦ nuclease and the guide RNA binds to the target sequence; the RuvC-like domain is capable of processing a pre-crRNA and cleaving the target nucleic acid; the programmable CasΦ nuclease cleaves both strands of a target nucleic acid comprising the target sequence, wherein the strand break is a staggered cut with a 5′ overhang; the programmable CasΦ nuclease is capable of cleaving the second region of the guide RNA in mammalian cells; and the programmable CasΦ nuclease does not require a tracrRNA to cleave the target nucleic acid.

[0039] In various aspects, the present disclosure provides a programmable nuclease or a nucleic acid encoding said programmable nuclease, wherein said programmable nuclease is a Type V CRISPR/Cas enzyme nuclease and comprises between 400 and 900 amino acids, and wherein the programmable CasΦ nuclease is capable of binding to a guide RNA comprising a first region that is complementary to a target nucleic acid sequence in a eukaryotic genome and a second region that binds to the programmable CasΦ nuclease; a complex comprising the programmable CasΦ nuclease and the guide RNA binds to the target sequence; the RuvC-like domain is capable of processing a pre-crRNA and cleaving the target nucleic acid; the programmable CasΦ nuclease cleaves both strands of a target nucleic acid comprising the target sequence, wherein the strand break is a staggered cut with a 5′ overhang; the programmable CasΦ nuclease is capable of cleaving the second region of the guide RNA in mammalian cells; and the programmable CasΦ nuclease does not require a tracrRNA to cleave the target nucleic acid.

[0040] In various aspects, the present disclosure provides a programmable CasΦ nuclease or a nucleic acid encoding said programmable CasΦ nuclease, wherein said programmable CasΦ nuclease comprises at least 85% sequence identity to a sequence selected from the group consisting of SEQ ID NOs: 1 to 47, SEQ ID NO. 105, and SEQ ID NO. 107, and wherein the programmable CasΦ nuclease is capable of binding to a guide RNA comprising a first region that is complementary to a target nucleic acid sequence in a eukaryotic genome and a second region that binds to the programmable CasΦ nuclease, wherein the first region comprises a seed region comprising between 10 and 16 nucleosides; a complex comprising the programmable CasΦ nuclease and the guide RNA binds to the target sequence; the programmable CasΦ nuclease comprises a RuvC domain, wherein the RuvC domain is capable of processing a pre-crRNA and cleaving the target nucleic acid; and the programmable CasΦ nuclease does not require a tracrRNA to cleave the target nucleic acid.

[0041] In various aspects, the present disclosure provides a programmable CasΦ nuclease or a nucleic acid encoding said programmable CasΦ nuclease, wherein said programmable CasΦ nuclease comprises a RuvC-like domain which matches PFAM family PF07282 and does not match PFAM family PF18516, and wherein the programmable CasΦ nuclease is capable of binding to a guide RNA comprising a first region that is complementary to a target nucleic acid sequence in a eukaryotic genome and a second region that binds to the programmable CasΦ nuclease, wherein the first region comprises a seed region comprising between 10 and 16 nucleosides; a complex comprising the programmable CasΦ nuclease and the guide RNA binds to the target sequence; the RuvC-like domain is capable of processing a pre-crRNA and cleaving the target nucleic acid; and the programmable CasΦ nuclease does not require a tracrRNA to cleave the target nucleic acid.

[0042] In various aspects, the present disclosure provides a programmable nuclease or a nucleic acid encoding said programmable nuclease, wherein said programmable nuclease is a Type V CRISPR/Cas enzyme nuclease and comprises between 400 and 900 amino acids, and wherein the programmable CasΦ nuclease is capable of binding to a guide RNA comprising a first region that is complementary to a target nucleic acid sequence in a eukaryotic genome and a second region that binds to the programmable CasΦ nuclease, wherein the first region comprises a seed region comprising between 10 and 16 nucleosides; a complex comprising the programmable CasΦ nuclease and the guide RNA binds to the target sequence; the RuvC-like domain is capable of processing a pre-crRNA and cleaving the target nucleic acid; and the programmable CasΦ nuclease does not require a tracrRNA to cleave the target nucleic acid.

[0043] In various aspects, the present disclosure provides a programmable CasΦ nuclease or a nucleic acid encoding said programmable CasΦ nuclease, wherein said programmable CasΦ nuclease comprises at least 85% sequence identity to a sequence selected from the group consisting of SEQ ID NOs: 1 to 47, SEQ ID NO. 105, and SEQ ID NO. 107, and wherein the programmable CasΦ nuclease is capable of binding to a guide RNA comprising a first region that is complementary to a target nucleic acid sequence in a eukaryotic genome and a second region that binds to the programmable CasΦ nuclease, wherein the first region comprises a seed region comprising between 10 and 16 nucleosides; a complex comprising the programmable CasΦ nuclease and the guide RNA binds to the target sequence; the programmable CasΦ nuclease comprises a RuvC domain, wherein the RuvC domain is capable of processing a pre-crRNA and cleaving the target nucleic acid; the programmable CasΦ nuclease cleaves both strands of the target nucleic acid comprising the target sequence, wherein the strand break is a staggered cut with a 5′ overhang; and the programmable CasΦ nuclease does not require a tracrRNA to cleave the target nucleic acid.

[0044] In various aspects, the present disclosure provides a programmable CasΦ nuclease or a nucleic acid encoding said programmable CasΦ nuclease, wherein said programmable CasΦ nuclease comprises a RuvC-like domain which matches PFAM family PF07282 and does not match PFAM family PF18516, and wherein the programmable CasΦ nuclease is capable of binding to a guide RNA comprising a first region that is complementary to a target nucleic acid sequence in a eukaryotic genome and a second region that binds to the programmable CasΦ nuclease, wherein the first region comprises a seed region comprising between 10 and 16 nucleosides; a complex comprising the programmable CasΦ nuclease and the guide RNA binds to the target sequence; the RuvC-like domain is capable of processing a pre-crRNA and cleaving the target nucleic acid; the programmable CasΦ nuclease cleaves both strands of the target nucleic acid comprising the target sequence, wherein the strand break is a staggered cut with a 5′ overhang; and the programmable CasΦ nuclease does not require a tracrRNA to cleave the target nucleic acid.

[0045] In various aspects, the present disclosure provides a programmable nuclease or a nucleic acid encoding said programmable nuclease, wherein said programmable nuclease is a Type V CRISPR/Cas enzyme nuclease and comprises between 400 and 900 amino acids, and wherein the programmable CasΦ nuclease is capable of binding to a guide RNA comprising a first region that is complementary to a target nucleic acid sequence in a eukaryotic genome and a second region that binds to the programmable CasΦ nuclease, wherein the first region comprises a seed region comprising between 10 and 16 nucleosides; a complex comprising the programmable CasΦ nuclease and the guide RNA binds to the target sequence; the RuvC-like domain is capable of processing a pre-crRNA and cleaving the target nucleic acid; the programmable CasΦ nuclease cleaves both strands of the target nucleic acid comprising the target sequence, wherein the strand break is a staggered cut with a 5′ overhang; and the programmable CasΦ nuclease does not require a tracrRNA to cleave the target nucleic acid.

[0046] In various aspects, the present disclosure provides a programmable CasΦ nuclease or a nucleic acid encoding said programmable CasΦ nuclease, wherein said programmable CasΦ nuclease comprises at least 85% sequence identity to a sequence selected from the group consisting of SEQ ID NOs: 1 to 47, SEQ ID NO. 105, and SEQ ID NO. 107, and wherein the programmable CasΦ nuclease is capable of binding to a guide RNA comprising a first region that is complementary to a target nucleic acid sequence in a eukaryotic genome and a second region that binds to the programmable CasΦ nuclease, wherein the first region comprises a seed region comprising between 10 and 16 nucleosides; a complex comprising the programmable CasΦ nuclease and the guide RNA binds to the target sequence; the programmable CasΦ nuclease comprises a RuvC domain, wherein the RuvC domain is capable of processing a pre-crRNA and cleaving the target nucleic acid; the programmable CasΦ nuclease is capable of cleaving the second region of the guide RNA in mammalian cells; and the programmable CasΦ nuclease does not require a tracrRNA to cleave the target nucleic acid.

[0047] In various aspects, the present disclosure provides a programmable CasΦ nuclease or a nucleic acid encoding said programmable CasΦ nuclease, wherein said programmable CasΦ nuclease comprises a RuvC-like domain which matches PFAM family PF07282 and does not match PFAM family PF18516, and wherein the programmable CasΦ nuclease is capable of binding to a guide RNA comprising a first region that is complementary to a target nucleic acid sequence in a eukaryotic genome and a second region that binds to the programmable CasΦ nuclease, wherein the first region comprises a seed region comprising between 10 and 16 nucleosides; a complex comprising the programmable CasΦ nuclease and the guide RNA binds to the target sequence; the RuvC-like domain is capable of processing a pre-crRNA and cleaving the target nucleic acid; the programmable CasΦ nuclease is capable of cleaving the second region of the guide RNA in mammalian cells; and the programmable CasΦ nuclease does not require a tracrRNA to cleave the target nucleic acid.

[0048] In various aspects, the present disclosure provides a programmable nuclease or a nucleic acid encoding said programmable nuclease, wherein said programmable nuclease is a Type V CRISPR/Cas enzyme nuclease and comprises between 400 and 900 amino acids, and wherein the programmable CasΦ nuclease is capable of binding to a guide RNA comprising a first region that is complementary to a target nucleic acid sequence in a eukaryotic genome and a second region that binds to the programmable CasΦ nuclease, wherein the first region comprises a seed region comprising between 10 and 16 nucleosides; a complex comprising the programmable CasΦ nuclease and the guide RNA binds to the target sequence; the RuvC-like domain is capable of processing a pre-crRNA and cleaving the target nucleic acid; the programmable CasΦ nuclease is capable of cleaving the second region of the guide RNA in mammalian cells; and the programmable CasΦ nuclease does not require a tracrRNA to cleave the target nucleic acid.

[0049] In various aspects, the present disclosure provides a programmable CasΦ nuclease or a nucleic acid encoding said programmable CasΦ nuclease, wherein said programmable CasΦ nuclease comprises at least 85% sequence identity to a sequence selected from the group consisting of SEQ ID NOs: 1 to 47, SEQ ID NO. 105, and SEQ ID NO. 107, and wherein the programmable CasΦ nuclease is capable of binding to a guide RNA comprising a first region that is complementary to a target nucleic acid sequence in a eukaryotic genome and a second region that binds to the programmable CasΦ nuclease, wherein the first region comprises a seed region comprising between 10 and 16 nucleosides; a complex comprising the programmable CasΦ nuclease and the guide RNA binds to the target sequence; the programmable CasΦ nuclease comprises a RuvC domain, wherein the RuvC domain is capable of processing a pre-crRNA and cleaving the target nucleic acid; the programmable CasΦ nuclease cleaves both strands of a target nucleic acid comprising the target sequence, wherein the strand break is a staggered cut with a 5′ overhang; the programmable CasΦ nuclease is capable of cleaving the second region of the guide RNA in mammalian cells; and the programmable CasΦ nuclease does not require a tracrRNA to cleave the target nucleic acid.

[0050] In various aspects, the present disclosure provides a programmable CasΦ nuclease or a nucleic acid encoding said programmable CasΦ nuclease, wherein said programmable CasΦ nuclease comprises a RuvC-like domain which matches PFAM family PF07282 and does not match PFAM family PF18516, and wherein the programmable CasΦ nuclease is capable of binding to a guide RNA comprising a first region that is complementary to a target nucleic acid sequence in a eukaryotic genome and a second region that binds to the programmable CasΦ nuclease, wherein the first region comprises a seed region comprising between 10 and 16 nucleosides; a complex comprising the programmable CasΦ nuclease and the guide RNA binds to the target sequence; the RuvC-like domain is capable of processing a pre-crRNA and cleaving the target nucleic acid; the programmable CasΦ nuclease cleaves both strands of a target nucleic acid comprising the target sequence, wherein the strand break is a staggered cut with a 5′ overhang; the programmable CasΦ nuclease is capable of cleaving the second region of the guide RNA in mammalian cells; and the programmable CasΦ nuclease does not require a tracrRNA to cleave the target nucleic acid.

[0051] In various aspects, the present disclosure provides a programmable nuclease or a nucleic acid encoding said programmable nuclease, wherein said programmable nuclease is a Type V CRISPR/Cas enzyme nuclease and comprises between 400 and 900 amino acids, and wherein the programmable CasΦ nuclease is capable of binding to a guide RNA comprising a first region that is complementary to a target nucleic acid sequence in a eukaryotic genome and a second region that binds to the programmable CasΦ nuclease, wherein the first region comprises a seed region comprising between 10 and 16 nucleosides; a complex comprising the programmable CasΦ nuclease and the guide RNA binds to the target sequence; the RuvC-like domain is capable of processing a pre-crRNA and cleaving the target nucleic acid; the programmable CasΦ nuclease cleaves both strands of a target nucleic acid comprising the target sequence, wherein the strand break is a staggered cut with a 5′ overhang; the programmable CasΦ nuclease is capable of cleaving the second region of the guide RNA in mammalian cells; and the programmable CasΦ nuclease does not require a tracrRNA to cleave the target nucleic acid. In some aspects the same active site in the RuvC domain or RuvC-like domain catalyzes the processing of the pre-crRNA and the cleaving of the target nucleic acid.

[0052] In some aspects, the programmable CasΦ nuclease is fused or linked to one or more NLS. In some aspects, the one or more NLS are fused or linked to the N-terminus of the programmable CasΦ nuclease; the one or more NLS are fused or linked to the C-terminus of the programmable CasΦ nuclease; or the one or more NLS are fused or linked to the N-terminus and the C-terminus of the programmable CasΦ nuclease.

[0053] In some cases, an aspect comprises the programmable CasΦ nuclease or a nucleic acid described herein and a gRNA comprising a first region that is complementary to a target nucleic acid sequence in a eukaryotic genome and a second region that binds to the programmable CasΦ nuclease. In some aspects, the first region comprises a seed region comprising between 10 and 16 nucleosides. In some aspects, the seed region comprises 16 nucleosides. In some cases, an aspect comprises the programmable CasΦ nuclease or a nucleic acid described herein and a cell, preferably wherein the cell is a eukaryotic cell.

[0054] In some cases, an aspect comprises the programmable CasΦ nuclease or a nucleic acid described herein and a gRNA comprising a first region that is complementary to a target nucleic acid sequence in a eukaryotic genome and a second region that binds to the programmable CasΦ nuclease and a cell, preferably wherein the cell is a eukaryotic cell. In some aspects, the first region comprises a seed region comprising between 10 and 16 nucleosides. In some aspects, the seed region comprises 16 nucleosides.

[0055] In some aspects, a eukaryotic cell comprises the programmable CasΦ nuclease or a nucleic acid described herein. In some aspects, the cell further comprises a gRNA comprising a first region that is complementary to a target nucleic acid sequence in a eukaryotic genome and a second region that binds to the programmable CasΦ nuclease. In some aspects, the first region comprises a seed region comprising between 10 and 16 nucleosides. In some aspects, the seed region comprises 16 nucleosides. In some aspects, a vector comprises a nucleic acid described herein. In some aspects, the vector is a viral vector.

[0056] In various aspects, the present disclosure provides a guide nucleic acid, or a nucleic acid encoding said guide nucleic acid, comprising a sequence that is the same as or differs by no more than 5, 4, 3, 2, or 1 nucleotides from: a sequence from Tables A to AH; or a sequence comprising a repeat sequence from Table 2 and a spacer sequence from Tables A to H. In some aspects, the guide nucleic acid comprises a sequence from Tables A to AH; or a sequence comprising a repeat sequence from Table 2 and a spacer sequence from Tables A to H. In some aspects, the guide nucleic acid comprises RNA and/or DNA. In some aspects, the guide nucleic acid is a guide RNA. Some aspects further comprise a complex comprising the guide nucleic acid and a programmable CasΦ nuclease. Some aspects comprise a eukaryotic cell comprising the guide nucleic acid. In some aspects, the eukaryotic cell further comprises a programmable CasΦ nuclease. Some aspects further comprise a vector encoding the guide nucleic acid. In some aspects, the vector is a viral vector.

[0057] In various aspects, the present disclosure provides a method of introducing a first modification in a first gene and a second modification in a second gene, the method comprising contacting a cell with a CasΦ nuclease; a first guide RNA that is at least partially complementary to an equal length portion of the first gene; and a second guide RNA that is at least partially complementary to an equal length portion of the second gene. In some aspects, the CasΦ nuclease is a CasΦ12 nuclease. In some aspects, the CasΦ12 nuclease comprises or consists of an amino acid sequence of SEQ ID NO: 12. In some aspects, the first and/or second modification comprises an insertion of a nucleotide, a deletion of a nucleotide or a combination thereof. In some aspects, the first and/or second modification comprises an epigenetic modification. In some aspects, the first and/or second mutation results in a reduction in the expression of the first gene and/or second gene, respectively. In some aspects, the reduction in the expression is at least about a 10% reduction, at least about a 20% reduction, at least about a 30% reduction, at least about a 40% reduction, at least about a 50% reduction, at least about a 60% reduction, at least about a 70% reduction, at least about an 80% reduction, or at least about a 90% reduction. In some aspects, the method comprises contacting the cell with three different guide RNAs targeting three different genes.

[0058] In various aspects, the present disclosure provides a programmable CasΦ nuclease or a nucleic acid encoding said programmable CasΦ nuclease, wherein said programmable CasΦ nuclease comprises at least 85% sequence identity to SEQ ID NO: 12. In some aspects, the programmable CasΦ nuclease comprises at least 90% sequence identity to SEQ ID NO: 12. In some aspects, the programmable CasΦ nuclease comprises at least 95% sequence identity to SEQ ID NO: 12. In some aspects, the programmable CasΦ nuclease comprises at least 98% sequence identity to SEQ ID NO: 12. In some aspects, the programmable CasΦ nuclease comprises or consists of an amino acid sequence of SEQ ID NO: 12. In some aspects, the programmable CasΦ nuclease comprises at least 85% sequence identity to SEQ ID NO: 18. In some aspects, the programmable CasΦ nuclease comprises at least 90% sequence identity to SEQ ID NO: 18. In some aspects, the programmable CasΦ nuclease comprises at least 95% sequence identity to SEQ ID NO: 18. In some aspects, the programmable CasΦ nuclease comprises at least 98% sequence identity to SEQ ID NO: 18. In some aspects, the programmable CasΦ nuclease comprises or consists of an amino acid sequence of SEQ ID NO: 18. In some aspects, the programmable CasΦ nuclease comprises at least 85% sequence identity to SEQ ID NO: 32. In some aspects, the programmable CasΦ nuclease comprises at least 85% sequence identity to SEQ ID NO: 32. In some aspects, the programmable CasΦ nuclease comprises at least 90% sequence identity to SEQ ID NO: 32. In some aspects, the programmable CasΦ nuclease comprises at least 95% sequence identity to SEQ ID NO: 32. In some aspects, the programmable CasΦ nuclease comprises at least 98% sequence identity to SEQ ID NO: 32. In some aspects, the programmable CasΦ nuclease comprises or consists of an amino acid sequence of SEQ ID NO: 32. In some aspects, the programmable CasΦ nuclease is capable of binding to a guide RNA comprising a first region that is complementary to a target nucleic acid sequence in a eukaryotic genome and a second region that binds to the programmable CasΦ nuclease. In some aspects, the a complex comprising the programmable CasΦ nuclease and the guide RNA binds to the target sequence. In some aspects, the programmable CasΦ nuclease does not require a tracrRNA to cleave a target nucleic acid. In some aspects, the programmable CasΦ nuclease comprises a RuvC domain, wherein the RuvC domain is capable of processing a pre-crRNA and cleaving a target nucleic acid.

[0059] In various aspects, the present disclosure provides a composition comprising the programmable CasΦ nuclease disclosed herein or a nucleic acid encoding said programmable nuclease, and a guide nucleic acid comprising a first region that is complementary to a target nucleic acid sequence in a eukaryotic genome and a second region that binds to the programmable CasΦ nuclease. In some aspects, the first region comprises a seed region comprising between 10 and 16 nucleosides. In some aspects, the seed region comprises 16 nucleosides. In some aspects, the composition comprises the programmable CasΦ nuclease or a nucleic acid encoding said programmable nuclease and a cell, preferably wherein the cell is a eukaryotic cell. In various aspects, the present disclosure provides a programmable CasΦ nuclease disclosed herein or a nucleic acid encoding said programmable nuclease, and a guide nucleic acid comprising a first region that is complementary to a target nucleic acid sequence in a eukaryotic genome and a second region that binds to the programmable CasΦ nuclease and a cell, preferably wherein the cell is a eukaryotic cell. In some aspects, the first region comprises a seed region comprising between 10 and 16 nucleosides. In some aspects, the seed region comprises 16 nucleosides.

[0060] In various aspects, the present disclosure provides a eukaryotic cell comprising the programmable CasΦ nuclease disclosed herein or a nucleic acid encoding said programmable nuclease. In some aspects, the cell further comprises a guide nucleic acid comprising a first region that is complementary to a target nucleic acid sequence in a eukaryotic genome and a second region that binds to the programmable CasΦ nuclease. In some aspects, the first region comprises a seed region comprising between 10 and 16 nucleosides. In some aspects, the seed region comprises 16 nucleosides.

[0061] In various aspects, the present disclosure provides a vector comprising the nucleic acid encoding a programmable nuclease as disclosed herein. In some aspects, the vector is a viral vector. In some aspects, the vector further comprises a nucleic acid encoding a guide nucleic acid, wherein the guide nucleic acid comprises a first region that is complementary to a target nucleic acid sequence in a eukaryotic genome and a second region that binds to the programmable CasΦ nuclease. In some aspects, the guide nucleic acid is a guide RNA. In some aspects, the vector further comprises a donor polynucleotide. In some aspects, the guide nucleic acid is a guide RNA.

[0062] In various aspects, the present disclosure provides a programmable nuclease or a nucleic acid encoding said programmable nuclease, wherein said programmable nuclease is a Type V CRISPR/Cas enzyme nuclease and comprises between 400 and 900 amino acids, and wherein the programmable nuclease is capable of binding to a guide RNA comprising a first region that is complementary to a target nucleic acid sequence in a eukaryotic genome and a second region that binds to the programmable nuclease; a complex comprising the programmable nuclease and the guide RNA binds to the target sequence; the programmable nuclease comprises a RuvC domain, wherein the RuvC domain is capable of processing a pre-crRNA and cleaving the target nucleic acid; the programmable nuclease cleaves both strands of the target nucleic acid comprising the target sequence, wherein the strand break is a staggered cut with a 5′ overhang; and the programmable nuclease does not require a tracrRNA to cleave the target nucleic acid.

[0063] In various aspects, the present disclosure provides a programmable nuclease or a nucleic acid encoding said programmable nuclease, wherein said programmable nuclease is a Type V CRISPR/Cas enzyme nuclease and comprises between 400 and 900 amino acids, and wherein the programmable nuclease is capable of binding to a guide RNA comprising a first region that is complementary to a target nucleic acid sequence in a eukaryotic genome and a second region that binds to the programmable nuclease; a complex comprising the programmable nuclease and the guide RNA binds to the target sequence; the RuvC-like domain is capable of processing a pre-crRNA and cleaving the target nucleic acid; the programmable nuclease is capable of cleaving the second region of the guide RNA in mammalian cells; and the programmable nuclease does not require a tracrRNA to cleave the target nucleic acid.

[0064] In various aspects, the present disclosure provides a programmable nuclease or a nucleic acid encoding said programmable nuclease, wherein said programmable nuclease is a Type V CRISPR/Cas enzyme nuclease and comprises between 400 and 900 amino acids, and wherein the programmable nuclease is capable of binding to a guide RNA comprising a first region that is complementary to a target nucleic acid sequence in a eukaryotic genome and a second region that binds to the programmable nuclease; a complex comprising the programmable nuclease and the guide RNA binds to the target sequence; the RuvC-like domain is capable of processing a pre-crRNA and cleaving the target nucleic acid; the programmable nuclease cleaves both strands of a target nucleic acid comprising the target sequence, wherein the strand break is a staggered cut with a 5′ overhang; the programmable nuclease is capable of cleaving the second region of the guide RNA in mammalian cells; and the programmable nuclease does not require a tracrRNA to cleave the target nucleic acid.

[0065] In various aspects, the present disclosure provides a programmable nuclease or a nucleic acid encoding said programmable nuclease, wherein said programmable nuclease is a Type V CRISPR/Cas enzyme nuclease and comprises between 400 and 900 amino acids, and wherein the programmable nuclease is capable of binding to a guide RNA comprising a first region that is complementary to a target nucleic acid sequence in a eukaryotic genome and a second region that binds to the programmable nuclease, wherein the first region comprises a seed region comprising between 10 and 16 nucleosides; a complex comprising the programmable nuclease and the guide RNA binds to the target sequence; the RuvC-like domain is capable of processing a pre-crRNA and cleaving the target nucleic acid; and the programmable nuclease does not require a tracrRNA to cleave the target nucleic acid.

[0066] In various aspects, the present disclosure provides a programmable nuclease or a nucleic acid encoding said programmable nuclease, wherein said programmable nuclease is a Type V CRISPR/Cas enzyme nuclease and comprises between 400 and 900 amino acids, and wherein the programmable nuclease is capable of binding to a guide RNA comprising a first region that is complementary to a target nucleic acid sequence in a eukaryotic genome and a second region that binds to the programmable nuclease, wherein the first region comprises a seed region comprising between 10 and 16 nucleosides; a complex comprising the programmable nuclease and the guide RNA binds to the target sequence; the RuvC-like domain is capable of processing a pre-crRNA and cleaving the target nucleic acid; the programmable nuclease cleaves both strands of the target nucleic acid comprising the target sequence, wherein the strand break is a staggered cut with a 5′ overhang; and the programmable nuclease does not require a tracrRNA to cleave the target nucleic acid.

[0067] In various aspects, the present disclosure provides a programmable nuclease or a nucleic acid encoding said programmable nuclease, wherein said programmable nuclease is a Type V CRISPR/Cas enzyme nuclease and comprises between 400 and 900 amino acids, and wherein the programmable nuclease is capable of binding to a guide RNA comprising a first region that is complementary to a target nucleic acid sequence in a eukaryotic genome and a second region that binds to the programmable nuclease, wherein the first region comprises a seed region comprising between 10 and 16 nucleosides; a complex comprising the programmable nuclease and the guide RNA binds to the target sequence; the RuvC-like domain is capable of processing a pre-crRNA and cleaving the target nucleic acid; the programmable nuclease is capable of cleaving the second region of the guide RNA in mammalian cells; and the programmable nuclease does not require a tracrRNA to cleave the target nucleic acid.

[0068] In various aspects, the present disclosure provides a programmable nuclease or a nucleic acid encoding said programmable nuclease, wherein said programmable nuclease is a Type V CRISPR/Cas enzyme nuclease and comprises between 400 and 900 amino acids, and wherein the programmable nuclease is capable of binding to a guide RNA comprising a first region that is complementary to a target nucleic acid sequence in a eukaryotic genome and a second region that binds to the programmable nuclease, wherein the first region comprises a seed region comprising between 10 and 16 nucleosides; a complex comprising the programmable nuclease and the guide RNA binds to the target sequence; the RuvC-like domain is capable of processing a pre-crRNA and cleaving the target nucleic acid; the programmable nuclease cleaves both strands of a target nucleic acid comprising the target sequence, wherein the strand break is a staggered cut with a 5′ overhang; the programmable nuclease is capable of cleaving the second region of the guide RNA in mammalian cells; and the programmable nuclease does not require a tracrRNA to cleave the target nucleic acid. In some aspects, the same active site in the RuvC domain or RuvC-like domain catalyzes the processing of the pre-crRNA and the cleaving of the target nucleic acid. In some aspects, the programmable nuclease is fused or linked to one or more NLS.

[0069] In various aspects, the programmable nuclease disclosed herein or the nucleic acid encoding said programmable nuclease is fused to one or more NLS. In some aspects, the one or more NLS are fused or linked to the N-terminus of the programmable nuclease. In some aspects, the one or more NLS are fused or linked to the C-terminus of the programmable nuclease; or the one or more NLS are fused or linked to the N-terminus and the C-terminus of the programmable nuclease.

[0070] In various aspects, the present disclosure provides a composition comprising a programmable nuclease disclosed herein or a nucleic acid encoding the programmable nuclease; and a gRNA comprising a first region that is complementary to a target nucleic acid sequence in a eukaryotic genome and a second region that binds to the programmable nuclease. In some aspects, the first region comprises a seed region comprising between 10 and 16 nucleosides. In some aspects, the seed region comprises 16 nucleosides. In some aspects, the programmable nuclease or a nucleic acid disclosed herein is comprised in a cell, preferably wherein the cell is a eukaryotic cell. In some aspects, the composition comprising the programmable nuclease or a nucleic acid disclosed herein further comprises a gRNA comprising a first region that is complementary to a target nucleic acid sequence in a eukaryotic genome and a second region that binds to the programmable nuclease and a cell, preferably wherein the cell is a eukaryotic cell. In some aspects, the first region comprises a seed region comprising between 10 and 16 nucleosides. In some aspects, the seed region comprises 16 nucleosides.

[0071] In various aspects, the present disclosure provides a eukaryotic cell comprising a programmable nuclease disclosed herein or a nucleic acid molecule encoding said programmable nuclease. In some aspects, the cell further comprises a gRNA comprising a first region that is complementary to a target nucleic acid sequence in a eukaryotic genome and a second region that binds to the programmable nuclease. In some aspects, the first region comprises a seed region comprising between 10 and 16 nucleosides. In some aspects, the seed region comprises 16 nucleosides. In some aspects, the nucleic acid disclosed herein is comprised in a vector. In some aspects, the vector is a viral vector.

[0072] In some aspects, the present disclosure provides a complex comprising a first programmable CasΦ nuclease and a second programmable CasΦ nuclease. In some aspects, the first programmable CasΦ nuclease and the second programmable CasΦ nuclease are the same programmable CasΦ nuclease. In some aspects, the dimer comprises a first programmable CasΦ nuclease and a second programmable CasΦ nuclease. In some aspects, the composition comprises a first programmable CasΦ nuclease and a second programmable CasΦ nuclease.

[0073] In various aspects, the present disclosure provides a method of modifying a cell comprising a target nucleic acid, comprising introducing a composition comprising a programmable CasΦ nuclease, programmable nuclease or a cas nuclease to a cell, wherein the programmable CasΦ nuclease, programmable nuclease or the cas nuclease cleaves the target nucleic acid, thereby modifying the cell.

[0074] In various aspects, the disclosure provides a method of modifying a cell comprising a target nucleic acid, comprising introducing to the cell (i) the programmable CasΦ nuclease or programmable nuclease disclosed herein and (ii) a guide nucleic acid, wherein the programmable CasΦ nuclease or programmable Cas nuclease cleaves the target nucleic acid, thereby modifying the cell. In some aspects, the guide nucleic acid is a guide RNA. In some aspects, the method further comprises introducing a donor polynucleotide to the cell. In some aspects, the method comprises inserting the donor polynucleotide into the target nucleic acid at the site of cleavage. In some aspects, the cell is a eukaryotic cell, preferably a human cell. In some aspects, the cell is a T cell. In some aspects, the cell is a CAR-T cell. In some aspects, the cell is a stem cell. In some aspects, the cell is a hematopoietic stem cell. In some aspects, the stem cell is a pluripotent stem cell, preferably an induced pluripotent stem cell. In some aspects, the modified cell obtained or obtainable by the method disclosed herein. In some aspect, the disclosure provides a modified human cell obtained or obtainable by the methods herein. In some aspects, the modified cell is a eukaryotic cell, preferably a human cell. In some aspects, the cell is a T cell. In some aspects, the T cell is a CAR-T cell. In some aspects, the cell is a stem cell. In some aspects, the cell is a hematopoietic stem cell. In some aspects, the cell is a pluripotent stem cell, preferably an induced pluripotent stem cell.

[0075] In some aspects, the method comprises the use of a CasΦ nuclease to introduce a first modification in a first gene and a second modification in a gene according to the methods disclosed herein. In some aspects, the method comprises the use of a programmable CasΦ nuclease, programmable nuclease or a cas nuclease to modify a cell according to the methods disclosed herein. In some aspects, the method comprises lipid nanoparticle delivery of a nucleic acid encoding the programmable CasΦ nuclease, programmable nuclease or cas nuclease, and the guide nucleic acid. In some aspects, the nucleic acid further comprises a donor polynucleotide. In some aspects, the nucleic acid is a viral vector. In some aspects, the viral vector is an AAV vector.

### INCORPORATION BY REFERENCE

[0076] All publications, patents, and patent applications mentioned in this specification are herein incorporated by reference to the same extent as if each individual publication, patent, or patent application was specifically and individually indicated to be incorporated by reference.

[0077] 42256-779_601_SL The patent or application file contains at least one drawing executed in color. Copies of this patent or patent application publication with color drawing(s) will be provided by the Office upon request and payment of the necessary fee.

[0078] The novel features of the invention are set forth with particularity in the appended claims. A better understanding of the features and advantages of the present invention will be obtained by reference to the following detailed description that sets forth illustrative embodiments, in which the principles of the invention are utilized, and the accompanying drawings of which:

[0079] FIG. 1 illustrates results of a cis-cleavage assay on CasΦ polypeptides to assess programmable nickase activity. The results showed that CasΦ orthologs comprise programmable nickase activity. The assay was performed on five CasΦ polypeptides, designated CasΦ.2, CasΦ.11, CasΦ.17, CasΦ.18, and CasΦ.12, in FIG. 1. For the assay, each of the CasΦ polypeptides was complexed with a guide nucleic acid at room temperature for 20 minutes to form a ribonucleoprotein (RNP) complex. The RNP complexes for each of the CasΦ polypeptides were separately incubated at 37° C. for 60 minutes with plasmid DNA targeted by the guide nucleic acids. The graph shows the percentage of plasmids that developed nicks (single-stranded breaks) or linearized (double-stranded breaks) during the 60 minute incubation, as measured by gel-electrophoresis. The data showed that CasΦ.2, CasΦ.11, CasΦ.17, and CasΦ.18 acted as programmable nickases. CasΦ.17 and CasΦ.18 produced only nicked product. CasΦ.2 and CasΦ.11 generated some linearized product but primarily nicked intermediate. CasΦ.12 generated almost entirely linearized product.

[0080] FIG. 2A and FIG. 2B illustrate results of a cis-cleavage assay on CasΦ polypeptides to assess the effect of crRNA repeat sequence and RNP complexing temperature on the programmable nickase activity of CasΦ polypeptides. Each of three proteins (designated CasΦ.11, CasΦ.17 and CasΦ.18 in FIG. 2A and FIG. 2B) was tested for its ability to nick plasmid DNA when complexed with one of four crRNAs comprising the repeat sequences of CasΦ.2, CasΦ.7, CasΦ.10 and CasΦ.18 (abbreviated j2, j7, j10, and j18, respectively, in FIG. 2A and FIG. 2B). FIG. 2C illustrates the alignment of CasΦ.2, CasΦ.7, CasΦ.10, and CasΦ.18 repeat sequences showing conserved (highlighted in black) and diverged nucleotides. For the assay, the RNP complex formation of each of the CasΦ polypeptides with the guide nucleic acid was performed at either room temperature or at 37° C. The incubation of the RNP complex with the input plasmid DNA that comprised the target sequence for the guide nucleic acids was carried out for 60 minutes at 37° C. FIG. 2A shows the percentage of input plasmid DNA that was nicked by RNP complexes assembled at room temperature. The data showed that crRNAs comprising repeat sequences from all tested CasΦ polypeptides supported nickase activity by CasΦ.11, CasΦ.17, and CasΦ.18; the only exception was the CasΦ.17/CasΦ.2-repeat pairing. FIG. 2B shows the percentage of input plasmid DNA that was nicked by RNP complexes assembled at 37° C. The data showed that the activity of each protein is completely abolished when complexed with crRNAs comprising a repeat sequence from CasΦ.2 or CasΦ.10. FIG. 2D shows corresponding data for CasΦ.2, CasΦ.4, CasΦ.6, CasΦ.9, CasΦ.10, CasΦ.12 and CasΦ.13 for the experiment shown in FIG. 2A and FIG. 2B. FIG. 2D also shows the percentage of input plasmid DNA that was linearized by CasΦ.2, CasΦ.4, CasΦ.6, CasΦ.9, CasΦ.10, CasΦ.11, CasΦ.12, CasΦ.13, CasΦ.17 and CasΦ.18 when complexed with one of four crRNAs J2, j7, j10 and j18, as described above.

[0081] FIG. 3 illustrates results of a cis-cleavage assay and sequencing run demonstrating that CasΦ nickases cleave the non-target strand of a double-stranded DNA target. A cis-cleavage assay was performed with four CasΦ polypeptides, CasΦ.12, CasΦ.2, CasΦ.11, and CasΦ.18, and a control comprising no CasΦ polypeptide, on a super-coiled plasmid DNA comprising a protospacer immediately downstream of a TTTN PAM sequence. The resulting DNA from the assay was Sanger sequenced using forward and reverse primers. The forward primer comprised the sequence of the target strand (TS) of the DNA sequence, while the reverse primer comprised the sequence of the non-target strand (NTS). If a strand had been cleaved by the CasΦ polypeptide being assayed, the sequencing signal would drop off from the cleavage site. FIG. 3A illustrates the cleavage pattern for the control that comprised no CasΦ polypeptide. In the absence of CasΦ polypeptide, the target DNA remained uncut and resulted in complete sequencing of both target and non-target strands. FIG. 3B illustrates the cleavage pattern for CasΦ.12 protein, which comprises double-stranded DNA cleavage activity. As shown in the figure, the sequencing signal dropped off on both the target and the non-target strands (as shown by arrows) demonstrating cleavage of both strands. FIG. 3C illustrates the cleavage pattern for CasΦ.2, which predominantly nicks DNA as illustrated in FIG. 1. The sequencing signal dropped off only on the non-target strand (bottom arrow) demonstrating nicking of the non-target strand. FIG. 3D illustrates the cleavage pattern for CasΦ.11. As illustrated in FIG. 1, CasΦ.11 only nicks DNA after 60 minutes of incubation with plasmid DNA. The sequencing signal dropped off on the non-target strand (bottom arrow), thus demonstrating that CasΦ.11 nicks the non-target strand. FIG. 3E illustrates the cleavage pattern for CasΦ.18. As illustrated in FIG. 1, CasΦ.18 only nicks DNA after 60 minutes of incubation with plasmid DNA. The sequencing signal dropped off on the non-target strand (bottom arrow), thus demonstrating that CasΦ.18 nicks the non-target strand.

[0082] FIG. 4 illustrates results of a cis-cleavage assay on CasΦ polypeptides to assess the effect of crRNA repeat and target sequence the programmable nickase and double strand DNA cleavage activity of CasΦ polypeptides. The heat map in FIG. 4A cleavage products for 60 minute in vitro plasmid cleavage reactions of 12 CasΦ orthologs paired with 10 crRNA repeat sequences. Except for 0, all Repeat and CasΦ axis labels refer Cas12Φ system numbers. Repeat 0 is a negative control including the CasΦ.18 crRNA repeat sequence and a non-targeting spacer sequence. With rare exceptions, preference for nicking or linearizing target DNA is not affected by crRNA repeat or target DNA sequence. Raw data for CasΦ.12 and CasΦ.18 targeting spacer 1 (boxes) are shown in B. FIG. 4B shows the raw gel data used to generate a subset of the heat map from FIG. 4A. CasΦ.12 predominantly linearizes plasmid DNA (i.e. cleaves both strands of a double strand DNA target) whereas CasΦ.18 primarily does not proceed beyond the first strand nicking.

[0083] FIG. 5 illustrates the structural conservation of CasΦ crRNA repeats. FIG. 5A shows the structure of the crRNA repeats for CasΦ.1, CasΦ.2, CasΦ.7, CasΦ.11, CasΦ.12, CasΦ.13, CasΦ.18, and CasΦ.32. These structures were calculated using an online RNA prediction tool (https://rna.urmc.rochester.edu/RNAstructureWeb/Servers/Predictl/Predictl.html) using default parameters at 37° C. The sequences of these repeats are provided in TABLE 2. FIG. 5B shows the consensus structure of the crRNA as determined by the LocaRNA tool using the crRNA repeats from CasΦ.1, CasΦ.2, CasΦ.4, CasΦ.7, CasΦ.10, CasΦ.11, CasΦ.12, CasΦ.13, Cas120.17, CasΦ.18, CasΦ.19, CasΦ.21, CasΦ.22, CasΦ.23, CasΦ.24, CasΦ.25, CasΦ.26, CasΦ.27, CasΦ.28, CasΦ.29, CasΦ.30, CasΦ.31, CasΦ.32, CasΦ.33, CasΦ.35 and CasΦ.41. FIG. 5C shows a further refined consensus structure of the crRNA determined by the LocaRNA tool. The LocaRNA tool aligns RNA sequences while considering consensus secondary structure of the RNA sequence.

[0084] FIG. 6 illustrates the optimal PAM preferences for CasΦ.2, CasΦ.4, CasΦ.11, CasΦ.12 and CasΦ.18. An in vitro cleavage assay was performed using a linear DNA target. Starting with a TTTA PAM, each position was varied one by one to the other 3 nucleotides for a total of 12 variants in addition to parental TTTA. FIG. 6A shows a heat map which illustrates the absolute levels of double strand cleavage (or nicking for CasΦ.18). FIG. 6B shows the data from FIG. 6A after normalization to the parental TTTA PAM as 100%. FIG. 6C shows the optimal PAM preferences of these CasΦ polypeptides with a summary of the data shown in FIG. 6A and FIG. 6B.

[0085] FIG. 7 illustrates that CasΦ polypeptides rapidly nick supercoiled DNA. CasΦ polypeptides where assembled with their native repeat crRNAs targeting one of two targets (S1, TATTAAATACTCGTATTGCTGTTCGATTAT (SEQ ID NO: 108), or S2, CACAGCTTGTCTGTAAGCGGATGCCATATG (SEQ ID NO: 109)) immediately downstream of a GTTG or TTTG PAM. Reactions were initiated with the addition of supercoiled target DNA and stopped after 1, 3, 6, 15, 30 and 60 mins. The cleavage was quantified by agarose gel analysis as nicked (left column) or linear (right column). Error bars are +/− SEM of duplicate time courses.

[0086] FIG. 8 illustrates that CasΦ polypeptides prefer full-length repeats and spacers from 16 to 20 nucleotides. crRNA panels varying in repeat and spacer length were tested for their ability to support CasΦ polypeptides spacer cleavage. Two different CasΦ repeats that function across CasΦ orthologs were utilized. FIG. 8A shows results of the assay for nicking (top) or linearization (bottom) as influenced by the length of the crRNA repeat. 19 nucleotides was the shortest repeat still supporting cleaving activity. FIG. 8B shows results for nicking (top) or linearization (bottom) as influenced by the length of the crRNA spacer. The optimal spacer length varied by target but is generally 16 to 20 nucleotides.

[0087] FIG. 9 illustrates CasΦ.12 cleavage in HEK293T cells and the effect of changing the spacer length on this cleavage. FIG. 9A provides a schematic of how CasΦ.12 cleavage activity was assessed in HEK293T cells. An Ac-GFP-expressing HEK293T cell line was transfected with a plasmid expressing CasΦ.12 and its crRNA targeting the Ac-GFP gene. CasΦ.12 cleavage was assessed by the reduction in Ac-GFP-expressing cells as assessed by flow cytometry. As shown in FIG. 9B, varying the spacer length varied the degree of CasΦ.12 cleavage. CasΦ.12 has a preference for a spacer length of 17 to 22 nucleotides in HEK293T cells, but longer spacers (up to 30 nucleotides was tested) also supported CasΦ.12 cleavage.

[0088] FIG. 10 illustrates that the CasΦ disclosed herein are a novel family of Cas nucleases. As shown in FIG. 10A, the InterPro database did not recognize CasΦ.2 as a protein family member. As a positive control, the InterPro database identified Acidaminococcus sp. (strain BV3L6) as a Cas12a protein family member, as shown in FIG. 10B.

[0089] FIG. 11 illustrates the raw HMM for PF07282.

[0090] FIG. 12 illustrates the raw HMM for PF18516.

[0091] FIG. 13 illustrates the cleavage activity of CasΦ.19-CasΦ.48.

[0092] FIG. 14 illustrates the PAM requirement of CasΦ polypeptides. FIG. 14A shows the PAM requirement of CasΦ.2, CasΦ.4, CasΦ.11 and CasΦ.12. FIG. 14B shows the PAM requirement of CasΦ.20, CasΦ.26, CasΦ.32, CasΦ.38 and CasΦ.45. FIG. 14C shows the cleavage products from the assessment of the PAM requirement for CasΦ.20, CasΦ.24 and CasΦ.25. FIG. 14D shows the quantification of the raw data shown in FIG. 14C.

[0093] FIG. 15 illustrates endogenous gene editing in HEK293T cells.

[0094] FIG. 16 illustrates endogenous gene editing in CHO cells. FIG. 16A shows CasΦ.12 mediated generation of insertion or deletion mutations (indel) in the endogenous Bak1, Bax and Fut8 genes. FIG. 16B shows the DNA donor oligos used to assess CasΦ.12 mediated gene editing via the homology directed repair pathway. FIG. 16C shows the detection of indels following delivery of CasΦ.12. FIG. 16D shows the sequence analysis for the data in FIG. 15C. FIG. 16E shows the detection of incorporated donor template following delivery of CasΦ.12 and a donor oligo. Further examples of CasΦ.12 mediated generation of indel mutations are shown in FIG. 16F, FIG. 16G and FIG. 1611 for Bak1, Bax and Fut8 genes, respectively. FIG. 161 shows the DNA donor oligos used to assess CasΦ.12 mediated gene editing via the homology directed repair pathway. FIG. 16J shows the frequency of HDR in CHO cells following delivery of either Cas9 and a gRNA targeting Bax, CasΦ.12 and a gRNA targeting Bax or CasΦ.12 and a gRNA targeting Fut8. FIG. 16K and FIG. 16L show the frequency of indel mutations and HDR, respectively, detected in CHO cells following delivery of CasΦ.12 and AAV6 DNA donors at the indicated number of viral genomes per cell (1×10\hat{ }5, 3×10\hat{ }5, or 1×10\hat{ }6).

[0095] FIG. 17 illustrates endogenous gene editing in K562 cells.

[0096] FIG. 18 illustrates endogenous gene editing in primary cells. FIG. 18A shows a flow cytometry analysis of T cells that have received CasΦ.12 with or without a gRNA targeting the beta-2 microglobulin gene. FIG. 18B shows the modification detected in K562 cells and T cells following delivery of CasΦ.12 and a gRNA targeting the beta-2 microglobulin gene. FIG. 18C shows the sequence analysis of the T cell population which received CasΦ.12 and the gRNA targeting the beta-2 microglobulin gene. FIG. 18D shows a flow cytometry analysis of T cells that have received CasΦ.12 with a gRNA targeting the T Cell Receptor Alpha Constant gene. FIG. 18E shows the sequence analysis of cell populations that received CasΦ.12 with a gRNA targeting the T Cell Receptor Alpha Constant gene. FIG. 18F shows the quantification of indels detected by sequence analysis.

[0097] FIG. 19 illustrates the cleavage of the second DNA strand by CasΦ nucleases in a separable reaction step to the cleavage of the first DNA strand.

[0098] FIG. 20 illustrates the trans cleavage of ssDNA by CasΦ nucleases in a detection assay.

[0099] FIG. 21 illustrates the CasΦ.12-mediated efficiency is comparable to that of Cas9. FIG. 21A shows the frequency of indel mutations and quantification of B2M knockout cells from flow cytometry panels in FIG. 21B.

[0100] FIG. 22 illustrates the identification of optimized gRNAs for genome editing with CasΦ.12 in CHO cells. FIG. 22A shows the frequency of indel mutations induced by CasΦ.12 polypeptides complexed with a 2′fluoro modified gRNA. FIG. 22B shows further CasΦ.12 RNP complexes that can mediate genome editing in CHO cells.

[0101] FIG. 23 illustrates minimal off-target CasΦ.12-mediated genome editing in CHO and HEK293 cells. FIG. 23A-F are off-target analysis InDel validation from a list of potential off-target sites based on in-silico computational predictions. FIG. 23A shows CasΦ.12 targeting Fut8, FIG. 23B shows CasΦ.12 targeting BAX, FIG. 23C shows Cas9 targeting BAX, FIG. 23D shows Cas9 targeting Fut8, FIG. 23E shows Cas9 targeting Bak1 and FIG. 23F shows CasΦ.12 targeting Bak1. FIG. 23G shows off-target analysis using unbiased guide-seq procedure, using CasΦ.12 and guides targeting human Fut8 in HEK293 cells. FIG. 23H shows off-target analysis using unbiased guide-seq procedure, using Cas9 and guides targeting human Fut8 in HEK293 cells.

[0102] FIG. 24 illustrates CasΦ.12-mediated genome editing via homology directed repair (HDR). FIG. 24A shows CasΦ.12-mediated gene editing via the HDR pathway. FIG. 24B shows a schematic of the donor oligonucleotide

[0103] FIG. 25 illustrates the ability of CasΦ.12 to target multiple genes. FIG. 25A shows the percentage of B2M and TRAC knockout after CasΦ.12-mediated genome editing with gRNAs with a repeat length of 20 nucleotides and a spacer length of 20 nucleotides. FIG. 25B shows the percentage of B2M and TRAC knockout after CasΦ.12-mediated genome editing with gRNAs with a repeat length of 20 nucleotides and a spacer length of 17 nucleotides. FIG. 25C shows corresponding flow cytometry panels for B2M and TRAC knockout with different gRNAs. FIG. 25D shows the percentage of TRAC knockout after CasΦ.12-mediated genome editing with modified gRNAs of different spacer lengths (repeat length of 20 nucleotides and a spacer length of 17 or 20 nucleotides). FIG. 25E shows a corresponding flow cytometry panel for TRAC knockout after CasΦ.12-mediated genome editing.

[0104] FIG. 26 illustrates the extended seed region of CasΦ.12. FIG. 26A and FIG. 26B show no indel mutations or CD3 knockout occurs when there is a single or double mismatch in the first 1-16 nucleotides from the 5′ end of the spacer. FIG. 26C and FIG. 26D provide schematics of the gRNAs with mismatches.

[0105] FIG. 27 illustrates the ability of CasΦ.12 to mediate genome editing in CHO cells with modified gRNAs.

[0106] FIG. 28 illustrates the ability of CasΦ.12 to mediate genome editing with gRNAs with variations in repeat and spacer length. FIG. 28A shows the frequency of CasΦ.12-mediated indel mutations using gRNA of different repeat lengths. FIG. 28B shows the frequency of CasΦ.12-mediated indel mutations using gRNA of different spacer lengths.

[0107] FIG. 29A-E illustrate exemplary gRNAs for targeting CD3, B2M and PD1 with CasΦ.12 in human primary T cells. FIG. 29F shows the screening of gRNAs targeting TRAC. FIG. 29H shows the screening of gRNAs targeting B2M. FIG. 29G and FIG. 29I show flow cytometry panels of exemplary gRNAs targeting TRAC and B2M, respectively.

[0108] FIG. 30 illustrates delivery of CasΦ.12 RNPs or CasΦ.12 mRNA both lead to efficient genome editing. FIG. 30A and FIG. 30B show flow cytometry panels of CasΦ.12 RNP complexes targeting B2M and TRAC in T cells, and are quantified in FIG. 30C and FIG. 30D. FIG. 30E and FIG. 30F show the quantification of indels detected by sequence analysis with delivery of CasΦ.12 RNPs. FIG. 30G and FIG. 30I show the frequency of indel mutations after delivery of CasΦ.12 mRNA and the quantification of B2M knockout cells shown in FIG. 30H is an exemplary FACS panel for two data points in FIG. 30G. FIG. 30J shows the distribution of the size of indel mutations induced by CasΦ.12 or Cas9.

[0109] FIG. 31 illustrates CasΦ.12 can process its own guide RNA in mammalian cells.

[0110] FIG. 32 illustrates CasΦ polypeptide-induced cleavage patterns. FIG. 32A, shows CasΦ polypeptides generated nicked and linearized plasmid DNA. FIG. 32B shows a schematic of the cut sites on the target and non-target strand. FIG. 32C shows sequence analysis of the non-target stand target strand and is represented in FIG. 32D. FIG. 32E shows a table of cut sites and overhangs of the different CasΦ polypeptides.

[0111] FIG. 33 illustrates the ability of CasΦ RNP complexes to knockout multiple genes simultaneously. T cells were nucleofected with RNP complexes of CasΦ.12 and gRNAs targeting B2M, TRAC or PDCD1 and the percentage knockout was measured using flow cytometry.

[0112] FIG. 34 illustrates the ability of CasΦ.12 RNP complexes to mediate high efficiency genome editing of PCKS9 in mouse Hepa1-6 cells. 95 CasΦ gRNAs were used along with Cas9, as a control. CasΦ.12 RNP complexes induced a maximum indel frequency of 48%, whereas Cas9 RNP complexed induced a maximum indel frequency of 22%.

[0113] FIG. 35 illustrates the ability of a CasΦ.12 all-in-one vector to mediate genome editing in Hepa1-6 mouse hepatoma cells. FIG. 35A shows a plasmid map of the AAV encoding the CasΦ polypeptide sequence and gRNA sequence. FIG. 35B illustrates repeat truncations. FIG. 35C shows efficient transfection with AAV. FIG. 35D shows the frequency of CasΦ.12 induced indel mutations. FIG. 35E and FIG. 35F show the frequency of CasΦ.12 induced indel mutations with different gRNA containing repeat and spacer sequences of different lengths.

[0114] FIG. 36 illustrates the optimization of LNP delivery of mRNA encoding CasΦ and gRNA. A range of N/P ratios were tested and the frequency of indel mutations was determined.

[0115] FIG. 37 illustrates CasΦ-mediated genome editing of CD34+ hematopoietic stem cells. Cells were nucleofected with either RNP complexes containing CasΦ.12 polypeptides and a B2M-targeting guide, or a mixture of CasΦ.12 mRNA and B2M-targeting guide and the frequency of indel mutations was determined.

[0116] FIG. 38 illustrates CasΦ-mediated genome editing of induced pluripotent stem cells. Cells were nucleofected with RNP complexes (CasΦ.12 polypeptides and gRNAs targeting either the B2M locus or targeting a CIITA locus) and the frequency of indel mutations was determined.

[0117] FIG. 39 illustrates CasΦ-mediated genome editing of the CIITA locus in K562 cells. Cells were nucleofected with RNP complexes (CasΦ polypeptides and gRNAs targeting CIITA) and the frequency of indel mutations was determined by NGS.

### DETAILED DESCRIPTION

[0118] The present disclosure provides methods, compositions, systems, and kits comprising programmable CasΦ nucleases. An illustrative composition comprises a programmable CasΦ nuclease or a nucleic acid encoding the programmable CasΦ nuclease, wherein the programmable CasΦ nuclease comprises at least 85% sequence identity to a sequence selected from the group consisting of SEQ ID NOs: 1 to 47 and SEQ ID NO. 105. In some embodiments, the composition further comprises a guide nucleic acid or a nucleic acid encoding the guide nucleic acid, wherein the guide nucleic acid comprises a region comprising a nucleotide sequence that is complementary to a target nucleic acid sequence and an additional region, wherein the region and the additional region are heterologous to each other. As used herein, the term “heterologous” may be used to describe or indicate that a first sequence is different from a second sequence and do not naturally occur together. As used herein, the term “heterologous” may be used to describe that a first moiety (e.g., a first sequence) is different from a second moiety (e.g., a second sequence) and, as such, the two moieties do not naturally occur together and are engineered to be a part of one entity. For example, a guide nucleic acid sequence comprising a region and an additional region that are heterologous to each other may indicate that the guide nucleic acid sequence is engineered to include the region and the additional region. The programmable CasΦ nuclease and the guide nucleic acid may be complexed together in a ribonucleoprotein complex. Alternatively, compositions consistent with the present disclosure include nucleic acids encoding for the programmable CasΦ nuclease and the guide nucleic acid. In some embodiments, the guide nucleic acid comprises a sequence with at least about 85% sequence identity to a sequence selected from the group consisting of SEQ ID NOs: 48 to 86. In some embodiments, the programmable CasΦ nuclease is SEQ ID NO: 12 or SEQ ID NO: 105. In some embodiments, the programmable CasΦ nuclease comprises nickase activity. In some embodiments, the programmable CasΦ nuclease comprises double-strand cleavage activity. As used herein, CasΦ may be referred to as Cas12j or Cas14u.

[0119] Also disclosed herein are compositions, methods, and systems for modifying a target nucleic acid sequence. An illustrative method for modifying a target nucleic acid sequence comprises contacting a target nucleic acid sequence with a programmable CasΦ nuclease comprising at least 85% sequence identity to a sequence selected from the group consisting of SEQ ID NOs: 1 to 47 and SEQ ID NO. 105, and a guide nucleic acid, wherein the programmable CasΦ nuclease cleaves the target nucleic acid sequence, thereby modifying the target nucleic acid sequence. In some embodiments, the programmable CasΦ nuclease introduces a double-stranded break in the target nucleic acid. In some embodiments, the programmable CasΦ nuclease introduces a single-stranded break.

[0120] Also disclosed herein are compositions, methods, and systems for modifying a target nucleic acid sequence comprising use of two or more programmable CasΦ nickases. An illustrative method for introducing a break in a target nucleic acid comprises contacting the target nucleic acid with: (a) a first guide nucleic acid comprising a region that binds to a first programmable nickase comprising at least 85% sequence identity to a sequence selected from the group consisting of SEQ ID NOs: 1 to 47 and SEQ ID NO. 105; and (b) a second guide nucleic acid comprising a region that binds to a second programmable nickase comprising at least 85% sequence identity to a sequence selected from the group consisting of SEQ ID NOs: 1 to 47 and SEQ ID NO. 105, wherein the first guide nucleic acid comprises an additional region that binds to the target nucleic acid and wherein the second guide nucleic acid comprises an additional region that binds to the target nucleic acid and wherein the additional region of the first guide nucleic acid and the additional region of the second guide nucleic acid bind opposing strands of the target nucleic acid.

[0121] Also disclosed herein are compositions, methods, and systems for detecting a target nucleic acid in a sample. An illustrative method for detecting a target nucleic acid in a sample comprises contacting the sample comprising the target nucleic acid with (a) a programmable CasΦ nuclease comprising at least 85% sequence identity to a sequence selected from the group consisting of SEQ ID NOs: 1 to 47 and SEQ ID NO. 105; (b) a guide RNA comprising a region that binds to the programmable CasΦ nuclease and an additional region that binds to the target nucleic acid; and (c) a labeled, single stranded DNA reporter that does not bind the guide RNA; cleaving the labeled single stranded DNA reporter by the programmable CasΦ nuclease to release a detectable label; and detecting the target nucleic acid by measuring a signal from the detectable label.

[0122] Also disclosed herein are compositions, methods, and systems for modulating transcription of a gene in a cell. An illustrative method of modulating transcription of a gene in a cell comprises introducing into a cell comprising a target nucleic acid sequence: (i) a fusion polypeptide or a nucleic acid encoding the fusion polypeptide, wherein the fusion polypeptide comprises: (a) a dCasΦ polypeptide comprising at least 85% sequence identity to a sequence selected from the group consisting of SEQ ID NOs: 1 to 47 and SEQ ID NO. 105, wherein the dCasΦ polypeptide is enzymatically inactive; and (b) a polypeptide comprising transcriptional regulation activity; and (ii) a guide nucleic acid, or a nucleic acid comprising a nucleotide sequence encoding the guide nucleic acid, wherein the guide nucleic acid comprises a region that binds to the dCasΦ polypeptide and an additional region that binds to the target nucleic acid; wherein transcription of the gene is modulated through the fusion polypeptide acting on the target nucleic acid sequence.

[0123] Also disclosed is use of a programmable CasΦ nuclease to modify a target nucleic acid sequence according to any of the methods described herein. Also disclosed is use of a first programmable nickase and a second programmable nickase to introduce a break in a target nucleic acid according to any of the methods described herein. Also disclosed is use of a programmable CasΦ nuclease to detect a target nucleic acid in a sample according to any of the methods described herein. Also disclosed is use of a dCasΦ polypeptide to modulate transcription of a gene in a cell according to any of the methods described herein.

### Programmable Nucleases

[0124] The present disclosure provides methods and compositions comprising programmable nucleases. The programmable nucleases can be complexed with a guide nucleic acid of the disclosure for targeting a target nucleic acid for detection, editing, modification, or regulation of the target nucleic acid.

[0125] The programmable nuclease can be used for detecting a target nucleic acid. For example, in certain embodiments, when the programmable nuclease is complexed with the guide nucleic acid and the target nucleic acid hybridizes to the guide nucleic acid, trans-cleavage of a single stranded DNA (ssDNA), such as an ssDNA reporter, by the programmable nuclease is activated. Detection of trans-cleavage of ssDNA can be used to determine a target nucleic acid in a sample.

[0126] The programmable nuclease can be used for editing or modifying a target nucleic acid, for example, by site-specific cleavage of a target sequence, donor nucleic acid insertion, or a combination thereof.

[0127] The programmable nuclease can be used for gene regulation of a target nucleic acid, for example, using a catalytically inactive programmable nuclease in combination with a polypeptide comprising gene regulation activity.

[0128] In some embodiments, the programmable nuclease is a programmable nuclease comprising site-specific nucleic acid cleavage activity. In some embodiments, the programmable nuclease is a programmable nuclease comprising double-strand DNA cleavage activity. In some embodiments, the programmable nuclease is a programmable nickase. In some embodiments, the programmable nuclease is a programmable DNA nickase. In some embodiments, the programmable nuclease is a programmable nuclease comprising a catalytically inactive nuclease domain. In some embodiments, the programmable nuclease comprising a catalytically inactive nuclease domain can include at least 1, at least 2, at least 3, at least 4, or at least 5 mutations relative to a wild type nuclease domain. Said mutations may be present within the cleaving or active site of the nuclease.

[0129] In some embodiments, the programmable nuclease is a programmable DNA nuclease. In some embodiments, the programmable nuclease is a Type V CRISPR/Cas enzyme, wherein a Type V CRISPR/Cas enzyme comprises a single active site or catalytic domain in a single RuvC domain. The RuvC domain is typically near the C-terminus of the enzyme. A single RuvC domain may comprise RuvC subdomains, for example RuvCI, RuvCII and RuvCIII. As used herein a “Type V CRISPR/Cas enzyme” or “Type V cas nuclease” or “Type V cas effector” may be used to describe a family of enzymes or a member thereof having diverse N-terminal structures and often comprising a conserved single catalytic RuvC-like endonuclease domain that is C-terminal of the N-terminal structures, derived from the TnpB protein encoded by autonomous or non-autonomous transposons. The terms “RuvC domain” and “RuvC-like domain” are used interchangeably for Type V CRISPR/Cas enzymes, Type V cas nucleases and Type V cas effectors. In some embodiments, the Type V CRISPR/Cas enzyme is a CasΦ nuclease. A CasΦ polypeptide can function as an endonuclease that catalyzes cleavage at a specific sequence in a target nucleic acid. A programmable CasΦ nuclease of the present disclosure may have a single active site in a RuvC domain that is capable of catalyzing pre-crRNA processing and nicking or cleaving of nucleic acids. This compact catalytic site may render the programmable CasΦ nuclease especially advantageous for genome engineering and new functionalities for genome manipulation.

[0130] In some embodiments, the RuvC domain is a RuvC-like domain. Various RuvC-like domains are known in the art and are easily identified using online tools such as InterPro (https://www.ebi.ac.uk/interpro/). For example, a RuvC-like domain may be a domain which shares homology with a region of TnpB proteins of the IS605 and other related families of transposons, as described in review articles such as Shmakov et al. (Nature Reviews Microbiology volume 15, pages 169-182(2017)) and Koonin E. V. and Makarova K. S. (2019, Phil. Trans. R. Soc., B 374:20180087). In some embodiments, the RuvC-like domain shares homology with the transposase IS605, OrfB, C-terminal. A transposase IS605, OrfB, C-terminal is easily identified by the skilled person using bioinformatics tools, such as PFAM (Finn et al. (Nucleic Acids Res. 2014 Jan. 1; 42(Database issue): D222-D230); El-Gebali et al. (2019) Nucleic Acids Res. doi:10.1093/nar/gky995). PFAM is a database of protein families in which each entry is composed of a seed alignment which forms the basis to build a profile hidden Markov model (HMM) using the HMMER software (hmmer.org). It is readily accessible via pfam.xfam.org, maintained by EMBL-EBI, which easily allows an amino acid sequence to be analyzed against the current release of PFAM (e.g. version 33.1 from May 2020), but local builds can also be implemented using publicly- and freely-available database files and tools. A transposase IS605, OrfB, C-terminal is easily identified by the skilled person using the HMM PF07282. PF07282 is reproduced for reference in FIG. 11 (accession number PF07282.12). The skilled person would also be able to identify a RuvC domain, for example with the HMM PF18516, using the PFAM tool. PF18516 is reproduced for reference in FIG. 12 (accession number PF18516.2). In some embodiments, the programmable CasΦ nuclease comprises a RuvC-like domain which matches PFAM family PF07282 but does not match PFAM family PF18516, as assessed using the PFAM tool (e.g. using PFAM version 33.1, and the HMM accession numbers PF07282.12 and PF18516.2). PFAM searches should ideally be performed using an E-value cut-off set at 1.0.

[0131] In some embodiments, a programmable nuclease described herein—or a programmable nuclease and guide RNA combination described herein—has an editing efficiency of at least 1%, at least 2%, at least 3%, at least 4%, at least 5%, at least 6%, at least 7%, at least 8%, at least 9%, at least 10%, at least 11%, at least 12%, at least 13%, at least 14%, at least 15%, at least 16%, at least 17%, at least 18%, at least 19%, at least 20%, at least 21%, at least 22%, at least 23%, at least 24%, at least 25%, at least 26%, at least 27%, at least 28%, at least 29%, at least 30%, at least 31%, at least 32%, at least 33%, at least 34%, at least 35%, at least 36%, at least 37%, at least 38%, at least 39%, at least 40%, at least 41%, at least 42%, at least 43%, at least 44%, at least 45%, at least 46%, at least 47%, at least 48%, at least 49%, at least 50%, at least 51%, at least 52%, at least 53%, at least 54%, at least 55%, at least 56%, at least 57%, at least 58%, at least 59%, at least 60%, at least 61%, at least 62%, at least 63%, at least 64%, at least 65%, at least 66%, at least 67%, at least 68%, at least 69%, at least 70%, at least 71%, at least 72%, at least 73%, at least 74%, at least 75%, at least 76%, at least 77%, at least 78%, at least 79%, at least 80%, at least 81%, at least 82%, at least 83%, at least 84%, at least 85%, at least 86%, at least 87%, at least 88%, at least 89%, at least 90%, at least 91%, at least 92%, at least 93%, at least 94%, at least 95%, at least 96%, at least 97%, at least 98%, at least 99%, or 100%. In some embodiments, a programmable nuclease described herein—or a programmable nuclease and guide RNA combination described herein—has an editing efficiency of at least 20%. In some embodiments, a programmable nuclease described herein—or a programmable nuclease and guide RNA combination described herein—has an editing efficiency of at least 25%. In some embodiments, a programmable nuclease described herein—or a programmable nuclease and guide RNA combination described herein—has an editing efficiency of at least 30%. In some embodiments, a programmable nuclease described herein—or a programmable nuclease and guide RNA combination described herein—has an editing efficiency of at least 35%. In some embodiments, a programmable nuclease described herein—or a programmable nuclease and guide RNA combination described herein—has an editing efficiency of at least 40%. In some embodiments, a programmable nuclease described herein—or a programmable nuclease and guide RNA combination described herein—has an editing efficiency of at least 45%. In some embodiments, a programmable nuclease described herein—or a programmable nuclease and guide RNA combination described herein—has an editing efficiency of at least 50%. In some embodiments, a programmable nuclease described herein—or a programmable nuclease and guide RNA combination described herein—has an editing efficiency of at least 55%. In some embodiments, a programmable nuclease described herein—or a programmable nuclease and guide RNA combination described herein—has an editing efficiency of at least 60%. In some embodiments, a programmable nuclease described herein—or a programmable nuclease and guide RNA combination described herein—has an editing efficiency of at least 65%. In some embodiments, a programmable nuclease described herein—or a programmable nuclease and guide RNA combination described herein—has an editing efficiency of at least 70%. In some embodiments, a programmable nuclease described herein—or a programmable nuclease and guide RNA combination described herein—has an editing efficiency of at least 75%. In some embodiments, a programmable nuclease described herein—or a programmable nuclease and guide RNA combination described herein—has an editing efficiency of at least 80%. In some embodiments, a programmable nuclease described herein—or a programmable nuclease and guide RNA combination described herein—has an editing efficiency of at least 85%. In some, a programmable nuclease described herein—or a programmable nuclease and guide RNA combination described herein—has an editing efficiency of at least 90%. In some embodiments, a programmable nuclease described herein—or a programmable nuclease and guide RNA combination described herein—has an editing efficiency of at least 95%. In some embodiments, a programmable nuclease described herein—or a programmable nuclease and guide RNA combination described herein—has an editing efficiency of at least 100%. In some embodiments, a programmable nuclease described herein—or a programmable nuclease and guide RNA combination described herein—has an editing efficiency of 42%. In some embodiments, said editing efficiency is determined by analyzing the frequency of indel mutations in a nucleic acid or gene knockout.

[0132] In some embodiments, a programmable nuclease described herein has a primary amino acid sequence length of less than 1500 amino acids, less than 1450 amino acids, less than 1400 amino acids, less than 1350 amino acids, less than 1300 amino acids, less than 1250 amino acids, less than 1200 amino acids, less than 1150 amino acids, less than 1100 amino acids, less than 1050 amino acids, less than 1000 amino acids, less than 950 amino acids, less than 900 amino acids, less than 850 amino acids, or less than 800 amino acids.

[0133] In some examples, a programmable nuclease described herein is a Type V cas nuclease. In some examples, the Type V cas nuclease, or a composition comprising the Type V cas nuclease, has an editing efficiency of at least 20%. In some examples, the Type V cas nuclease, or a composition comprising the Type V cas nuclease, has an editing efficiency of at least 25%. In some examples, the Type V cas nuclease, or a composition comprising the Type V cas nuclease, has an editing efficiency of at least 30%. In some examples, the Type V cas nuclease, or a composition comprising the Type V cas nuclease, has an editing efficiency of at least 35%. In some examples, the Type V cas nuclease, or a composition comprising the Type V cas nuclease, has an editing efficiency of at least 40%. In some examples, the Type V cas nuclease, or a composition comprising the Type V cas nuclease, has an editing efficiency of at least 45%. In some examples, the Type V cas nuclease, or a composition comprising the Type V cas nuclease, has an editing efficiency of at least 50%. In some examples, the Type V cas nuclease, or a composition comprising the Type V cas nuclease, has an editing efficiency of at least 55%. In some examples, the Type V cas nuclease, or a composition comprising the Type V cas nuclease, has an editing efficiency of at least 60%. In some examples, the Type V cas nuclease, or a composition comprising the Type V cas nuclease, has an editing efficiency of at least 65%. In some examples, the Type V cas nuclease, or a composition comprising the Type V cas nuclease, has an editing efficiency of at least 70%. In some examples, the Type V cas nuclease, or a composition comprising the Type V cas nuclease, has an editing efficiency of at least 75%. In some examples, the Type V cas nuclease, or a composition comprising the Type V cas nuclease, has an editing efficiency of at least 80%. In some examples, the Type V cas nuclease, or a composition comprising the Type V cas nuclease, has an editing efficiency of at least 85%. In some examples, the Type V cas nuclease, or a composition comprising the Type V cas nuclease, has an editing efficiency of at least 90%. In some examples, the Type V cas nuclease, or a composition comprising the Type V cas nuclease, has an editing efficiency of at least 95%. In some examples, the Type V cas nuclease, or a composition comprising the Type V cas nuclease, has an editing efficiency of 100%.

[0134] In some examples, a programmable nuclease described herein has a primary amino acid sequence length of less than 850 amino acids. In some examples, the programmable nuclease having a primary amino acid sequence length of less than 850 amino acids has an editing efficiency of at least 20%. In some examples, the programmable nuclease having a primary amino acid sequence length of less than 850 amino acids has an editing efficiency of at least 25%. In some examples, the programmable nuclease having a primary amino acid sequence length of less than 850 amino acids has an editing efficiency of at least 30%. In some examples, the programmable nuclease having a primary amino acid sequence length of less than 850 amino acids has an editing efficiency of at least 35%. In some examples, the programmable nuclease having a primary amino acid sequence length of less than 850 amino acids has an editing efficiency of at least 40%. In some examples, the programmable nuclease having a primary amino acid sequence length of less than 850 amino acids has an editing efficiency of at least 45%. In some examples, the programmable nuclease having a primary amino acid sequence length of less than 850 amino acids has an editing efficiency of at least 50%. In some examples, the programmable nuclease having a primary amino acid sequence length of less than 850 amino acids has an editing efficiency of at least 55%. In some examples, the programmable nuclease having a primary amino acid sequence length of less than 850 amino acids has an editing efficiency of at least 60%. In some examples, the programmable nuclease having a primary amino acid sequence length of less than 850 amino acids has an editing efficiency of at least 65%. In some examples, the programmable nuclease having a primary amino acid sequence length of less than 850 amino acids has an editing efficiency of at least 70%. In some examples, the programmable nuclease having a primary amino acid sequence length of less than 850 amino acids has an editing efficiency of at least 7500. In some examples, the programmable nuclease having a primary amino acid sequence length of less than 850 amino acids has an editing efficiency of at least 80%. In some examples, the programmable nuclease having a primary amino acid sequence length of less than 850 amino acids has an editing efficiency of at least 8500. In some examples, the programmable nuclease having a primary amino acid sequence length of less than 850 amino acids has an editing efficiency of at least 90%. In some examples, the programmable nuclease having a primary amino acid sequence length of less than 850 amino acids has an editing efficiency of at least 950%. In some examples, the programmable nuclease having a primary amino acid sequence length of less than 850 amino acids has an editing efficiency of 100%.

[0135] TABLE 1 provides amino acid sequences of illustrative CasΦ polypeptides that can be used in compositions and methods of the disclosure.

TABLE 1
CasΦ Amino Acid Sequences

| | SEQ ID | |
|---|---|---|
| Name | NO | Amino Acid Sequence |
| CasΦ.1 | 1 | MADTPTLFTQFLRHHLPGQRFRKDILKQAGRILANKGEDATI |
| | | AFLRGKSEESPPDFQPPVKCPIIACSRPLTEWPIYQASVAIQGY |
| | | VYGQSLAEFEASDPGCSKDGLLGWFDKTGVCTDYFSVQGLN |
| | | LIFQNARKRYIGVQTKVTNRNEKRHKKLKRINAKRIAEGLPE |
| | | LTSDEPESALDETGHLIDPPGLNTNIYCYQQVSPKPLALSEVN |
| | | QLPTAYAGYSTSGDDPIQPMVTKDRLSISKGQPGYIPEHQRA |
| | | LLSQKKHRRMRGYGLKARALLVIVRIQDDWAVIDLRSLLRN |
| | | AYWRRIVQTKEPSTITKLLKLVTGDPVLDATRMVATFTYKPG |
| | | IVQVRSAKCLKNKQGSKLFSERYLNETVSVTSIDLGSNNLVA |
| | | VATYRLVNGNTPELLQRFTLPSHLVKDFERYKQAHDTLEDSI |
| | | QKTAVASLPQGQQTEIRMWSMYGFREAQERVCQELGLADG |
| | | SIPWNVMTATSTILTDLFLARGGDPKKCMFTSEPKKKKNSKQ |
| | | VLYKIRDRAWAKMYRTLLSKETREAWNKALWGLKRGSPDY |
| | | ARLSKRKEELARRCVNYTISTAEKRAQCGRTIVALEDLNIGFF |
| | | HGRGKQEPGWVGLFTRKKENRWLMQALHKAFLELAHHRG |
| | | YHVIEVNPAYTSQTCPVCRHCDPDNRDQHNREAFHCIGCGFR |
| | | GNADLDVATHNIAMVAITGESLKRARGSVASKTPQPLAAE |
| CasΦ.2 | 2 | MPKPAVESEFSKVLKKHFPGERFRSSYMKRGGKILAAQGEE |
| | | AVVAYLQGKSEEEPPNFQPPAKCHVVTKSRDFAEWPIMKAS |
| | | EAIQRYIYALSTTERAACKPGKSSESHAAWFAATGVSNHGYS |
| | | HVQGLNLIFDHTLGRYDGVLKKVQLRNEKARARLESINASR |
| | | ADEGLPEIKAEEEEVATNETGHLLQPPGINPSFYVYQTISPQA |
| | | YRPRDEIVLPPEYAGYVRDPNAPIPLGVVRNRCDIQKGCPGYI |
| | | PEWQREAGTAISPKTGKAVTVPGLSPKKNKRMRRYWRSEKE |
| | | KAQDALLVTVRIGTDWVVIDVRGLLRNARWRTIAPKDISLN |
| | | ALLDLFTGDPVIDVRRNIVTFTYTLDACGTYARKWTLKGKQ |
| | | TKATLDKLTATQTVALVAIDLGQTNPISAGISRVTQENGALQ |
| | | CEPLDRFTLPDDLLKDISAYRIAWDRNEEELRARSVEALPEA |
| | | QQAEVRALDGVSKETARTQLCADFGLDPKRLPWDKMSSNT |
| | | TFISEALLSNSVSRDQVFFTPAPKKGAKKKAPVEVMRKDRT |
| | | WARAYKPRLSVEAQKLKNEALWALKRTSPEYLKLSRRKEEL |
| | | CRRSINYVIEKTRRRTQCQIVIPVIEDLNVRFFHGSGKRLPGW |
| | | DNFFTAKKENRWFIQGLHKAFSDLRTHRSFYVFEVRPERTSIT |
| | | CPKCGHCEVGNRDGEAFQCLSCGKTCNADLDVATHNLTQV |
| | | ALTGKTMPKREEPRDAQGTAPARKTKKASKSKAPPAEREDQ |
| | | TPAQEPSQTS |
| CasΦ.3 | 3 | MYILEMADLKSEPSLLAKLLRDRFPGKYWLPKYWKLAEKKR |
| | | LTGGEEAACEYMADKQLDSPPPNFRPPARCVILAKSRPFEDW |
| | | PVHRVASKAQSFVIGLSEQGFAALRAAPPSTADARRDWLRS |
| | | HGASEDDLMALEAQLLETIMGNAISLHGGVLKKIDNANVKA |
| | | AKRLSGRNEARLNKGLQELPPEQEGSAYGADGLLVNPPGLN |
| | | LNIYCRKSCCPKPVKNTARFVGHYPGYLRDSDSILISGTMDR |
| | | LTIIEGMPGHIPAWQREQGLVKPGGRRRRLSGSESNMRQKVD |
| | | PSTGPRRSTRSGTVNRSNQRTGRNGDPLLVEIRMKEDWVLL |
| | | DARGLLRNLRWRESKRGLSCDHEDLSLSGLLALFSGDPVIDP |
| | | VRNEVVFLYGEGIIPVRSTKPVGTRQSKKLLERQASMGPLTLI |
| | | SCDLGQTNLIAGRASAISLTHGSLGVRSSVRIELDPEIIKSFERL |
| | | RKDADRLETEILTAAKETLSDEQRGEVNSHEKDSPQTAKASL |
| | | CRELGLHPPSLPWGQMGPSTTFIADMLISHGRDDDAFLSHGE |
| | | FPTLEKRKKFDKRFCLESRPLLSSETRKALNESLWEVKRTSSE |
| | | YARLSQRKKEMARRAVNFVVEISRRKTGLSNVIVNIEDLNVR |
| | | IFHGGGKQAPGWDGFFRPKSENRWFIQAIHKAFSDLAAHHGI |
| | | PVIESDPQRTSMTCPECGHCDSKNRNGVRFLCKGCGASMDA |
| | | DFDAACRNLERVALTGKPMPKPSTSCERLLSATTGKVCSDHS |
| | | LSHDAIEKAS |
| CasΦ.4 | 4 | MEKEITELTKIRREFPNKKFSSTDMKKAGKLLKAEGPDAVRD |
| | | FLNSCQEIIGDFKPPVKTNIVSISRPFEEWPVSMVGRAIQEYYF |
| | | SLTKEELESVHPGTSSEDHKSFFNITGLSNYNYTSVQGLNLIF |
| | | KNAKAIYDGTLVKANNKNKKLEKKFNEINHKRSLEGLPIITP |
| | | DFEEPFDENGHLNNPPGINRNIYGYQGCAAKVFVPSKHKMV |
| | | SLPKEYEGYNRDPNLSLAGFRNRLEIPEGEPGHVPWFQRMDI |
| | | PEGQIGHVNKIQRFNFVHGKNSGKVKFSDKTGRVKRYHHSK |
| | | YKDATKPYKFLEESKKVSALDSILAHITIGDDWVVFDIRGLYR |
| | | NVFYRELAQKGLTAVQLLDLFTGDPVIDPKKGVVTFSYKEG |
| | | VVPVFSQKIVPRFKSRDTLEKLTSQGPVALLSVDLGQNEPVA |
| | | ARVCSLKNINDKITLDNSCRISFLDDYKKQIKDYRDSLDELEI |
| | | KIRLEAINSLETNQQVEIRDLDVFSADRAKANTVDMFDIDPN |
| | | LISWDSMSDARVSTQISDLYLKNGGDESRVYFEINNKRIKRS |
| | | DYNISQLVRPKLSDSTRKNLNDSIWKLKRTSEEYLKLSKRKL |
| | | ELSRAVVNYTIRQSKLLSGINDIVIILEDLDVKKKFNGRGIRDI |
| | | GWDNFFSSRKENRWFIPAFHKAFSELSSNRGLCVIEVNPAWT |
| | | SATCPDCGFCSKENRDGINFTCRKCGVSYHADIDVATLNIAR |
| | | VAVLGKPMSGPADRERLGDTKKPRVARSRKTMKRKDISNST |
| | | VEAMVTA |
| CasΦ.5 | 5 | MDMLDTETNYATETPAQQQDYSPKPPKKAQRAPKGFSKKA |
| | | RPEKKPPKPITLFTQKHFSGVRFLKRVIRDASKILKLSESRTITF |
| | | LEQAIERDGSAPPDVTPPVHNTIMAVTRPFEEWPEVILSKALQ |
| | | KHCYALTKKIKIKTWPKKGPGKKCLAAWSARTKIPLIPGQVQ |
| | | ATNGLFDRIGSIYDGVEKKVTNRNANKKLEYDEAIKEGRNPA |
| | | VPEYETAYNIDGTLINKPGYNPNLYITQSRTPRLITEADRPLVE |
| | | KILWQMVEKKTQSRNQARRARLEKAAHLQGLPVPKFVPEK |
| | | VDRSQKIEIRIIDPLDKIEPYMPQDRMAIKASQDGHVPYWQRP |
| | | FLSKRRNRRVRAGWGKQVSSIQAWLTGALLVIVRLGNEAFL |
| | | ADIRGALRNAQWRKLLKPDATYQSLFNLFTGDPVVNTRTNH |
| | | LTMAYREGVVNIVKSRSFKGRQTREHLLTLLGQGKTVAGVS |
| | | FDLGQKHAAGLLAAHFGLGEDGNPVFTPIQACFLPQRYLDSL |
| | | TNYRNRYDALTLDMRRQSLLALTPAQQQEFADAQRDPGGQ |
| | | AKRACCLKLNLNPDEIRWDLVSGISTMISDLYIERGGDPRDV |
| | | HQQVETKPKGKRKSEIRILKIRDGKWAYDFRPKIADETRKAQ |
| | | REQLWKLQKASSEFERLSRYKINIARAIANWALQWGRELSG |
| | | CDIVIPVLEDLNVGSKFFDGKGKWLLGWDNRFTPKKENRWF |
| | | IKVLHKAVAELAPHRGVPVYEVMPHRTSMTCPACHYCHPTN |
| | | REGDRFECQSCHVVKNTDRDVAPYNILRVAVEGKTLDRWQ |
| | | AEKKPQAEPDRPMILIDNQES |
| CasΦ.6 | 6 | MDMLDTETNYATETPAQQQDYSPKPPKKAQRAPKGFSKKA |
| | | RPEKKPPKPITLFTQKHFSGVRFLKRVIRDASKILKLSESRTITF |
| | | LEQAIERDGSAPPDVTPPVHNTIMAVTRPFEEWPEVILSKALQ |
| | | KHCYALTKKIKIKTWPKKGPGKKCLAAWSARTKIPLIPGQVQ |
| | | ATNGLFDRIGSIYDGVEKKVTNRNANKKLEYDEAIKEGRNPA |
| | | VPEYETAYNIDGTLINKPGYNPNLYITQSRTPRLITEADRPLVE |
| | | KILWQMVEKKTQSRNQARRARLEKAAHLQGLPVPKFVPEK |
| | | VDRSQKIEIRIIDPLDKIEPYMPQDRMAIKASQDGHVPYWQRP |
| | | FLSKRRNRRVRAGWGKQVSSIQAWLTGALLVIVRLGNEAFL |
| | | ADIRGALRNAQWRKLLKPDATYQSLFNLFTGDPVVNTRTNH |
| | | LTMAYREGVVDIVKSRSFKGRQTREHLLTLLGQGKTVAGVS |
| | | FDLGQKHAAGLLAAHFGLGEDGNPVFTPIQACFLPQRYLDSL |
| | | TNYRNRYDALTLDMRRQSLLALTPAQQQEFADAQRDPGGQ |
| | | AKRACCLKLNLNPDEIRWDLVSGISTMISDLYIERGGDPRDV |
| | | HQQVETKPKGKRKSEIRILKIRDGKWAYDFRPKIADETRKAQ |
| | | REQLWKLQKASSEFERLSRYKINIARAIANWALQWGRELSG |
| | | CDIVIPVLEDLNVGSKFFDGKGKWLLGWDNRFTPKKENRWF |
| | | IKVLHKAVAELAPHKGVPVYEVMPHRTSMTCPACHYCHPTN |
| | | REGDRFECQSCHVVKNTDRDVAPYNILRVAVEGKTLDRWQ |
| | | AEKKPQAEPDRPMILIDNQES |
| CasΦ.7 | 7 | MSSLPTPLELLKQKHADLFKGLQFSSKDNKMAGKVLKKDGE |
| | | EAALAFLSERGVSRGELPNFRPPAKTLVVAQSRPFEEFPIYRV |
| | | SEAIQLYVYSLSVKELETVPSGSSTKKEHQRFFQDSSVPDFGY |
| | | TSVQGLNKIFGLARGIYLGVITRGENQLQKAKSKHEALNKKR |
| | | RASGEAETEFDPTPYEYMTPERKLAKPPGVNHSIMCYVDISV |
| | | DEFDFRNPDGIVLPSEYAGYCREINTAIEKGTVDRLGHLKGG |
| | | PGYIPGHQRKESTTEGPKINFRKGRIRRSYTALYAKRDSRRVR |
| | | QGKLALPSYRHHMMRLNSNAESAILAVIFFGKDWVVFDLRG |
| | | LLRNVRWRNLFVDGSTPSTLLGMFGDPVIDPKRGVVAFCYK |
| | | EQIVPVVSKSITKMVKAPELLNKLYLKSEDPLVLVAIDLGQT |
| | | NPVGVGVYRVMNASLDYEVVTRFALESELLREIESYRQRTN |
| | | AFEAQIRAETFDAMTSEEQEEITRVRAFSASKAKENVCHRFG |
| | | MPVDAVDWATMGSNTIHIAKWVMRHGDPSLVEVLEYRKDN |
| | | EIKLDKNGVPKKVKLTDKRIANLTSIRLRFSQETSKHYNDTM |
| | | WELRRKHPVYQKLSKSKADFSRRVVNSIIRRVNHLVPRARIV |
| | | FIIEDLKNLGKVFHGSGKRELGWDSYFEPKSENRWFIQVLHK |
| | | AFSETGKHKGYYIIECWPNWTSCTCPKCSCCDSENRHGEVFR |
| | | CLACGYTCNTDFGTAPDNLVKIATTGKGLPGPKKRCKGSSK |
| | | GKNPKIARSSETGVSVTESGAPKVKKSSPTQTSQSSSQSAP |
| CasΦ.8 | 8 | MNKIEKEKTPLAKLMNENFAGLRFPFAIIKQAGKKLLKEGEL |
| | | KTIEYMTGKGSIEPLPNFKPPVKCLIVAKRRDLKYFPICKASC |
| | | EIQSYVYSLNYKDFMDYFSTPMTSQKQHEEFFKKSGLNIEYQ |
| | | NVAGLNLIFNNVKNTYNGVILKVKNRNEKLKKKAIKNNYEF |
| | | EEIKTFNDDGCLINKPGINNVIYCFQSISPKILKNITHLPKEYND |
| | | YDCSVDRNIIQKYVSRLDIPESQPGHVPEWQRKLPEFNNTNN |
| | | PRRRRKWYSNGRNISKGYSVDQVNQAKIEDSLLAQIKIGED |
| | | WIILDIRGLLRDLNRRELISYKNKLTIKDVLGFFSDYPIIDIKKN |
| | | LVTFCYKEGVIQVVSQKSIGNKKSKQLLEKLIENKPIALVSID |
| | | LGQTNPVSVKISKLNKINNKISIESFTYRFLNEEILKEIEKYRK |
| | | DYDKLELKLINEA |
| CasΦ.9 | 9 | MDMLDTETNYATETPSQQQDYSPKPPKKDRRAPKGFSKKAR |
| | | PEKKPPKPITLFTQKHFSGVRFLKRVIRDASKILKLSESRTITFL |
| | | EQAIERDGSAPPDVTPPVHNTIMAVTRPFEEWPEVILSKALQK |
| | | HCYALTKKIKIKTWPKKGPGKKCLAAWSARTKIPLIPGQVQA |
| | | TNGLFDRIGSIYDGVEKKVTNRNANKKLEYDEAIKEGRNPAV |
| | | PEYETAYNIDGTLINKPGYNPNLYITQSRTPRLITEADRPLVEK |
| | | ILWQMVEKKTQSRNQARRARLEKAAHLQGLPVPKFVPEKV |
| | | DRSQKIEIRIIDPLDKIEPYMPQDRMAIKASQDGHVPYWQRPF |
| | | LSKRRNRRVRAGWGKQVSSIQAWLTGALLVIVRLGNEAFLA |
| | | DIRGALRNAQWRKLLKPDATYQSLFNLFTGDPVVNTRTNHL |
| | | TMAYREGVVDIVKSRSFKGRQTREHLLTLLGQGKTVAGVSF |
| | | DLGQKHAAGLLAAHFGLGEDGNPVFTPIQACFLPQRYLDSLT |
| | | NYRNRYDALTLDMRRQSLLALTPAQQQEFADAQRDPGGQA |
| | | KRACCLKLNLNPDEIRWDLVSGISTMISDLYIERGGDPRDVH |
| | | QQVETKPKGKRKSEIRILKIRDGKWAYDFRPKIADETRKAQR |
| | | EQLWKLQKASSEFERLSRYKINIARAIANWALQWGRELSGC |
| | | DIVIPVLEDLNVGSKFFDGKGKWLLGWDNRFTPKKENRWFI |
| | | KVLHKAVAELAPHRGVPVYEVMPHRTSMTCPACHYCHPTN |
| | | REGDRFECQSCHVVKNTDRDVAPYNILRVAVEGKTLDRWQ |
| | | AEKKPQAEPDRPMILIDNQES |
| CasΦ.10 | 10 | MDMLDTETNYATETPSQQQDYSPKPPKKDRRAPKGFSKKAR |
| | | PEKKPPKPITLFTQKHFSGVRFLKRVIRDASKILKLSESRTITFL |
| | | EQAIERDGSAPPDVTPPVHNTIMAVTRPFEEWPEVILSKALQK |
| | | HCYALTKKIKIKTWPKKGPGKKCLAAWSARTKIPLIPGQVQA |
| | | TNGLFDRIGSIYDGVEKKVTNRNANKKLEYDEAIKEGRNPAV |
| | | PEYETAYNIDGTLINKPGYNPNLYITQSRTPRLITEADRPLVEK |
| | | ILWQMVEKKTQSRNQARRARLEKAAHLQGLPVPKFVPEKV |
| | | DRSQKIEIRIIDPLDKIEPYMPQDRMAIKASQDGHVPYWQRPF |
| | | LSKRRNRRVRAGWGKQVSSIQAWLTGALLVIVRLGNEAFLA |
| | | DIRGALRNAQWRKLLKPDATYQSLFNLFTGDPVVNTRTNHL |
| | | TMAYREGVVNIVKSRSFKGRQTREHLLTLLGQGKTVAGVSF |
| | | DLGQKHAAGLLAAHFGLGEDGNPVFTPIQACFLPQRYLDSLT |
| | | NYRNRYDALTLDMRRQSLLALTPAQQQEFADAQRDPGGQA |
| | | KRACCLKLNLNPDEIRWDLVSGISTMISDLYIERGGDPRDVH |
| | | QQVETKPKGKRKSEIRILKIRDGKWAYDFRPKIADETRKAQR |
| | | EQLWKLQKASSEFERLSRYKINIARAIANWALQWGRELSGC |
| | | DIVIPVLEDLNVGSKFFDGKGKWLLGWDNRFTPKKENRWFI |
| | | KVLHKAVAELAPHRGVPVYEVMPHRTSMTCPACHYCHPTN |
| | | REGDRFECQSCHVVKNTDRDVAPYNILRVAVEGKTLDRWQ |
| | | AEKKPQAEPDRPMILIDNQES |
| CasΦ.11 | 11 | MSNKTTPPSPLSLLLRAHFPGLKFESQDYKIAGKKLRDGGPE |
| | | AVISYLTGKGQAKLKDVKPPAKAFVIAQSRPFIEWDLVRVSR |
| | | QIQEKIFGIPATKGRPKQDGLSETAFNEAVASLEVDGKSKLNE |
| | | ETRAAFYEVLGLDAPSLHAQAQNALIKSAISIREGVLKKVEN |
| | | RNEKNLSKTKRRKEAGEEATFVEEKAHDERGYLIHPPGVNQ |
| | | TIPGYQAVVIKSCPSDFIGLPSGCLAKESAEALTDYLPHDRMT |
| | | IPKGQPGYVPEWQHPLLNRRKNRRRRDWYSASLNKPKATCS |
| | | KRSGTPNRKNSRTDQIQSGRFKGAIPVLMRFQDEWVIIDIRGL |
| | | LRNARYRKLLKEKSTIPDLLSLFTGDPSIDMRQGVCTFIYKAG |
| | | QACSAKMVKTKNAPEILSELTKSGPVVLVSIDLGQTNPIAAK |
| | | VSRVTQLSDGQLSHETLLRELLSNDSSDGKEIARYRVASDRL |
| | | RDKLANLAVERLSPEHKSEILRAKNDTPALCKARVCAALGL |
| | | NPEMIAWDKMTPYTEFLATAYLEKGGDRKVATLKPKNRPE |
| | | MLRRDIKFKGTEGVRIEVSPEAAEAYREAQWDLQRTSPEYLR |
| | | LSTWKQELTKRILNQLRHKAAKSSQCEVVVMAFEDLNIKMM |
| | | HGNGKWADGGWDAFFIKKRENRWFMQAFHKSLTELGAHK |
| | | GVPTIEVTPHRTSITCTKCGHCDKANRDGERFACQKCGFVAH |
| | | ADLEIATDNIERVALTGKPMPKPESERSGDAKKSVGARKAAF |
| | | KPEEDAEAAE |
| CasΦ.12 | 12 | MIKPTVSQFLTPGFKLIRNHSRTAGLKLKNEGEEACKKFVRE |
| | | NEIPKDECPNFQGGPAIANIIAKSREFTEWEIYQSSLAIQEVIFT |
| | | LPKDKLPEPILKEEWRAQWLSEHGLDTVPYKEAAGLNLIIKN |
| | | AVNTYKGVQVKVDNKNKNNLAKINRKNEIAKLNGEQEISFE |
| | | EIKAFDDKGYLLQKPSPNKSIYCYQSVSPKPFITSKYHNVNLP |
| | | EEYIGYYRKSNEPIVSPYQFDRLRIPIGEPGYVPKWQYTFLSK |
| | | KENKRRKLSKRIKNVSPILGIICIKKDWCVFDMRGLLRTNHW |
| | | KKYHKPTDSINDLFDYFTGDPVIDTKANVVRFRYKMENGIV |
| | | NYKPVREKKGKELLENICDQNGSCKLATVDVGQNNPVAIGL |
| | | FELKKVNGELTKTLISRHPTPIDFCNKITAYRERYDKLESSIKL |
| | | DAIKQLTSEQKIEVDNYNNNFTPQNTKQIVCSKLNINPNDLP |
| | | WDKMISGTHFISEKAQVSNKSEIYFTSTDKGKTKDVMKSDY |
| | | KWFQDYKPKLSKEVRDALSDIEWRLRRESLEFNKLSKSREQ |
| | | DARQLANWISSMCDVIGIENLVKKNNFFGGSGKREPGWDNF |
| | | YKPKKENRWWINAIHKALTELSQNKGKRVILLPAMRTSITCP |
| | | KCKYCDSKNRNGEKFNCLKCGIELNADIDVATENLATVAITA |
| | | QSMPKPTCERSGDAKKPVRARKAKAPEFHDKLAPSYTVVLR |
| | | EAV |
| CasΦ.13 | 13 | MRQPAEKTAFQVFRQEVIGTQKLSGGDAKTAGRLYKQGKM |
| | | EAAREWLLKGARDDVPPNFQPPAKCLVVAVSHPFEEWDISK |
| | | TNHDVQAYIYAQPLQAEGHLNGLSEKWEDTSADQHKLWFE |
| | | KTGVPDRGLPVQAINKIAKAAVNRAFGVVRKVENRNEKRRS |
| | | RDNRIAEHNRENGLTEVVREAPEVATNADGFLLHPPGIDPSIL |
| | | SYASVSPVPYNSSKHSFVRLPEEYQAYNVEPDAPIPQFVVED |
| | | RFAIPPGQPGYVPEWQRLKCSTNKHRRMRQWSNQDYKPKA |
| | | GRRAKPLEFQAHLTRERAKGALLVVMRIKEDWVVFDVRGL |
| | | LRNVEWRKVLSEEAREKLTLKGLLDLFTGDPVIDTKRGIVTF |
| | | LYKAEITKILSKRTVKTKNARDLLLRLTEPGEDGLRREVGLV |
| | | AVDLGQTHPIAAAIYRIGRTSAGALESTVLHRQGLREDQKEK |
| | | LKEYRKRHTALDSRLRKEAFETLSVEQQKEIVTVSGSGAQIT |
| | | KDKVCNYLGVDPSTLPWEKMGSYTHFISDDFLRRGGDPNIV |
| | | HFDRQPKKGKVSKKSQRIKRSDSQWVGRMRPRLSQETAKAR |
| | | MEADWAAQNENEEYKRLARSKQELARWCVNTLLQNTRCIT |
| | | QCDEIVVVIEDLNVKSLHGKGAREPGWDNFFTPKTENRWFIQ |
| | | ILHKTFSELPKHRGEHVIEGCPLRTSITCPACSYCDKNSRNGE |
| | | KFVCVACGATFHADFEVATYNLVRLATTGMPMPKSLERQG |
| | | GGEKAGGARKARKKAKQVEKIVVQANANVTMNGASLHSP |
| CasΦ.14 | 14 | MSSLPTPLELLKQKHADLFKGLQFSSKDNKMAGKVLKKDGE |
| | | EAALAFLSERGVSRGELPNFRPPAKTLVVAQSRPFEEFPIYRV |
| | | SEAIQLYVYSLSVKELETVPSGSSTKKEHQRFFQDSSVPDFGY |
| | | TSVQGLNKIFGLARGIYLGVITRGENQLQKAKSKHEALNKKR |
| | | RASGEAETEFDPTPYEYMTPERKLAKPPGVNHSIMCYVDISV |
| | | DEFDFRNPDGIVLPSEYAGYCREINTAIEKGTVDRLGHLKGG |
| | | PGYIPGHQRKESTTEGPKINFRKGRIRRSYTALYAKRDSRRVR |
| | | QGKLALPSYRHHMMRLNSNAESAILAVIFFGKDWVVFDLRG |
| | | LLRNVRWRNLFVDGSTPSTLLGMFGDPVIDPKRGVVAFCYK |
| | | EQIVPVVSKSITKMVKAPELLNKLYLKSEDPLVLVAIDLGQT |
| | | NPVGVGVYRVMNASLDYEVVTRFALESELLREIESYRQRTN |
| | | AFEAQIRAETFDAMTSEEQEEITRVRAFSASKAKENVCHRFG |
| | | MPVDAVDWATMGSNTIHIAKWVMRHGDPSLVEVLEYRKDN |
| | | EIKLDKNGVPKKVKLTDKRIANLTSIRLRFSQETSKHYNDTM |
| | | WELRRKHPVYQKLSKSKADFSRRVVNSIIRRVNHLVPRARIV |
| | | FILEDLKNLGKVFHGSGKRELGWDSYFEPKSENRWFIQVLHK |
| | | AFSETGKHKGYYIIECWPNWTSCTCPKCSCCDSENRHGEVFR |
| | | CLACGYTCNTDFGTAPDNLVKIATTGKGLPGPKKRCKGSSK |
| | | GKNPKIARSSETGVSVTESGAPKVKKSSPTQTSQSSSQSAP |
| CasΦ.15 | 15 | MIKPTVSQFLTPGFKLIRNHSRTAGLKLKNEGEEACKKFVRE |
| | | NEIPKDECPNFQGGPAIANIIAKSREFTEWEIYQSSLAIQEVIFT |
| | | LPKDKLPEPILKEEWRAQWLSEHGLDTVPYKEAAGLNLIIKN |
| | | AVNTYKGVQVKVDNKNKNNLAKINRKNEIAKLNGEQEISFE |
| | | EIKAFDDKGYLLQKPSPNKSIYCYQSVSPKPFITSKYHNVNLP |
| | | EEYIGYYRKSNEPIVSPYQFDRLRIPIGEPGYVPKWQYTFLSK |
| | | KENKRRKLSKRIKNVSPILGIICIKKDWCVFDMRGLLRTNHW |
| | | KKYHKPTDSINDLFDYFTGDPVIDTKANVVRFRYKMENGIV |
| | | NYKPVREKKGKELLENICDQNGSCKLATVDVGQNNPVAIGL |
| | | FELKKVNGELTKTLISRHPTPIDFCNKITAYRERYDKLESSIKL |
| | | DAIKQLTSEQKIEVDNYNNNFTPQNTKQIVCSKLNINPNDLP |
| | | WDKMISGTHFISEKAQVSNKSEIYFTSTDKGKTKDVMKSDY |
| | | KWFQDYKPKLSKEVRDALSDIEWRLRRESLEFNKLSKSREQ |
| | | DARQLANWISSMCDVIGIENLVKKNNFFGGSGKREPGWDNF |
| | | YKPKKENRWWINAIHKALTELSQNKGKRVILLPAMRTSITCP |
| | | KCKYCDSKNRNGEKFNCLKCGIELNADIDVATENLATVAITA |
| | | QSMPKPTCERSGDAKKPVRARKAKAPEFHDKLAPSYTVVLR |
| | | EAV |
| CasΦ.16 | 16 | MSNKTTPPSPLSLLLRAHFPGLKFESQDYKIAGKKLRDGGPE |
| | | AVISYLTGKGQAKLKDVKPPAKAFVIAQSRPFIEWDLVRVSR |
| | | QIQEKIFGIPATKGRPKQDGLSETAFNEAVASLEVDGKSKLNE |
| | | ETRAAFYEVLGLDAPSLHAQAQNALIKSAISIREGVLKKVEN |
| | | RNEKNLSKTKRRKEAGEEATFVEEKAHDERGYLIHPPGVNQ |
| | | TIPGYQAVVIKSCPSDFIGLPSGCLAKESAEALTDYLPHDRMT |
| | | IPKGQPGYVPEWQHPLLNRRKNRRRRDWYSASLNKPKATCS |
| | | KRSGTPNRKNSRTDQIQSGRFKGAIPVLMRFQDEWVIIDIRGL |
| | | LRNARYRKLLKEKSTIPDLLSLFTGDPSIDMRQGVCTFIYKAG |
| | | QACSAKMVKTKNAPEILSELTKSGPVVLVSIDLGQTNPIAAK |
| | | VSRVTQLSDGQLSHETLLRELLSNDSSDGKEIARYRVASDRL |
| | | RDKLANLAVERLSPEHKSEILRAKNDTPALCKARVCAALGL |
| | | NPEMIAWDKMTPYTEFLATAYLEKGGDRKVATLKPKNRPE |
| | | MLRRDIKFKGTEGVRIEVSPEAAEAYREAQWDLQRTSPEYLR |
| | | LSTWKQELTKRILNQLRHKAAKSSQCEVVVMAFEDLNIKMM |
| | | HGNGKWADGGWDAFFIKKRENRWFMQAFHKSLTELGAHK |
| | | GVPTIEVTPHRTSITCTKCGHCDKANRDGERFACQKCGFVAH |
| | | ADLEIATDNIERVALTGKPMPKPESERSGDAKKSVGARKAAF |
| | | KPEEDAEAAE |
| CasΦ.17 | 17 | MYSLEMADLKSEPSLLAKLLRDRFPGKYWLPKYWKLAEKK |
| | | RLTGGEEAACEYMADKQLDSPPPNFRPPARCVILAKSRPFED |
| | | WPVHRVASKAQSFVIGLSEQGFAALRAAPPSTADARRDWLR |
| | | SHGASEDDLMALEAQLLETIMGNAISLHGGVLKKIDNANVK |
| | | AAKRLSGRNEARLNKGLQELPPEQEGSAYGADGLLVNPPGL |
| | | NLNIYCRKSCCPKPVKNTARFVGHYPGYLRDSDSILISGTMD |
| | | RLTIIEGMPGHIPAWQREQGLVKPGGRRRRLSGSESNMRQKV |
| | | DPSTGPRRSTRSGTVNRSNQRTGRNGDPLLVEIRMKEDWVL |
| | | LDARGLLRNLRWRESKRGLSCDHEDLSLSGLLALFSGDPVID |
| | | PVRNEVVFLYGEGIIPVRSTKPVGTRQSKKLLERQASMGPLT |
| | | LISCDLGQTNLIAGRASAISLTHGSLGVRSSVRIELDPEIIKSFE |
| | | RLRKDADRLETEILTAAKETLSDEQRGEVNSHEKDSPQTAKA |
| | | SLCRELGLHPPSLPWGQMGPSTTFIADMLISHGRDDDAFLSH |
| | | GEFPTLEKRKKFDKRFCLESRPLLSSETRKALNESLWEVKRTS |
| | | SEYARLSQRKKEMARRAVNFVVEISRRKTGLSNVIVNIEDLN |
| | | VRIFHGGGKQAPGWDGFFRPKSENRWFIQAIHKAFSDLAAH |
| | | HGIPVIESDPQRTSMTCPECGHCDSKNRNGVRFLCKGCGASM |
| | | DADFDAACRNLERVALTGKPMPKPSTSCERLLSATTGKVCS |
| | | DHSLSHDAIEKAS |
| CasΦ.18 | 18 | MEKEITELTKIRREFPNKKFSSTDMKKAGKLLKAEGPDAVRD |
| | | FLNSCQEIIGDFKPPVKTNIVSISRPFEEWPVSMVGRAIQEYYF |
| | | SLTKEELESVHPGTSSEDHKSFFNITGLSNYNYTSVQGLNLIF |
| | | KNAKAIYDGTLVKANNKNKKLEKKFNEINHKRSLEGLPIITP |
| | | DFEEPFDENGHLNNPPGINRNIYGYQGCAAKVFVPSKHKMV |
| | | SLPKEYEGYNRDPNLSLAGFRNRLEIPEGEPGHVPWFQRMDI |
| | | PEGQIGHVNKIQRFNFVHGKNSGKVKFSDKTGRVKRYHHSK |
| | | YKDATKPYKFLEESKKVSALDSILAIITIGDDWVVFDIRGLYR |
| | | NVFYRELAQKGLTAVQLLDLFTGDPVIDPKKGVVTFSYKEG |
| | | VVPVFSQKIVPRFKSRDTLEKLTSQGPVALLSVDLGQNEPVA |
| | | ARVCSLKNINDKITLDNSCRISFLDDYKKQIKDYRDSLDELEI |
| | | KIRLEAINSLETNQQVEIRDLDVFSADRAKANTVDMFDIDPN |
| | | LISWDSMSDARVSTQISDLYLKNGGDESRVYFEINNKRIKRS |
| | | DYNISQLVRPKLSDSTRKNLNDSIWKLKRTSEEYLKLSKRKL |
| | | ELSRAVVNYTIRQSKLLSGINDIVIILEDLDVKKKFNGRGIRDI |
| | | GWDNFFSSRKENRWFIPAFHKTFSELSSNRGLCVIEVNPAWT |
| | | SATCPDCGFCSKENRDGINFTCRKCGVSYHADIDVATLNIAR |
| | | VAVLGKPMSGPADRERLGDTKKPRVARSRKTMKRKDISNST |
| | | VEAMVTA |
| CasΦ.19 | 19 | MLVRTSTLVQDNKNSRSASRAFLKKPKMPKNKHIKEPTELA |
| | | KLIRELFPGQRFTRAINTQAGKILKHKGRDEVVEFLKNKGIDK |
| | | EQFMDFRPPTKARIVATSGAIEEFSYLRVSMAIQECCFGKYKF |
| | | PKEKVNGKLVLETVGLTKEELDDFLPKKYYENKKSRDRFFL |
| | | KTGICDYGYTYAQGLNEIFRNTRAIYEGVFTKVNNRNEKRRE |
| | | KKDKYNEERRSKGLSEEPYDEDESATDESGHLINPPGVNLNI |
| | | WTCEGFCKGPYVTKLSGTPGYEVILPKVFDGYNRDPNEIISC |
| | | GITDRFAIPEGEPGHIPWHQRLEIPEGQPGYVPGHQRFADTGQ |
| | | NNSGKANPNKKGRMRKYYGHGTKYTQPGEYQEVFRKGHRE |
| | | GNKRRYWEEDFRSEAHDCILYVIHIGDDWVVCDLRGPLRDA |
| | | YRRGLVPKEGITTQELCNLFSGDPVIDPKHGVVTFCYKNGLV |
| | | RAQKTISAGKKSRELLGALTSQGPIALIGVDLGQTEPVGARAF |
| | | IVNQARGSLSLPTLKGSFLLTAENSSSWNVFKGEIKAYREAID |
| | | DLAIRLKKEAVATLSVEQQTEIESYEAFSAEDAKQLACEKFG |
| | | VDSSFILWEDMTPYHTGPATYYFAKQFLKKNGGNKSLIEYIP |
| | | YQKKKSKKTPKAVLRSDYNIACCVRPKLLPETRKALNEAIRI |
| | | VQKNSDEYQRLSKRKLEFCRRVVNYLVRKAKKLTGLERVII |
| | | AIEDLKSLEKFFTGSGKRDNGWSNFFRPKKENRWFIPAFHKA |
| | | FSELAPNRGFYVIECNPARTSITDPDCGYCDGDNRDGIKFECK |
| | | KCGAKHHTDLDVAPLNIAIVAVTGRPMPKTVSNKSKRERSG |
| | | GEKSVGASRKRNHRKSKANQEMLDATSSAAE |
| CasΦ.20 | 20 | MPKIKKPTEISLLRKEVFPDLHFAKDRMRAASLVLKNEGREA |
| | | AIEYLRVNHEDKPPNFMPPAKTPYVALSRPLEQWPIAQASIAI |
| | | QKYIFGLTKDEFSATKKLLYGDKSTPNTESRKRWFEVTGVPN |
| | | FGYMSAQGLNAIFSGALARYEGVVQKVENRNKKRFEKLSEK |
| | | NQLLIEEGQPVKDYVPDTAYHTPETLQKLAENNHVRVEDLG |
| | | DMIDRLVHPPGIHRSIYGYQQVPPFAYDPDNPKGIILPKAYAG |
| | | YTRKPHDIIEAMPNRLNIPEGQAGYIPEHQRDKLKKGGRVKR |
| | | LRTTRVRVDATETVRAKAEALNAEKARLRGKEAILAVFQIEE |
| | | DWALIDMRGLLRNVYMRKLIAAGELTPTTLLGYFTETLTLDP |
| | | RRTEATFCYHLRSEGALHAEYVRHGKNTRELLLDLTKDNEKI |
| | | ALVTIDLGQRNPLAAAIFRVGRDASGDLTENSLEPVSRMLLP |
| | | QAYLDQIKAYRDAYDSFRQNIWDTALASLTPEQQRQILAYE |
| | | AYTPDDSKENVLRLLLGGNVMPDDLPWEDMTKNTHYISDR |
| | | YLADGGDPSKVWFVPGPRKRKKNAPPLKKPPKPRELVKRSD |
| | | HNISHLSEFRPQLLKETRDAFEKAKIDTERGHVGYQKLSTRK |
| | | DQLCKEILNWLEAEAVRLTRCKTMVLGLEDLNGPFFNQGKG |
| | | KVRGWVSFFRQKQENRWIVNGFRKNALARAHDKGKYILEL |
| | | WPSWTSQTCPKCKHVHADNRHGDDFVCLQCGARLHADAEV |
| | | ATWNLAVVAIQGHSLPGPVREKSNDRKKSGSARKSKKANES |
| | | GKVVGAWAAQATPKRATSKKETGTARNPVYNPLETQASCP |
| | | AP |
| CasΦ.21 | 21 | MTPSPQIARLVETPLAAALKAHHPGKKFRSDYLKKAGKILKD |
| | | QGVEAAMAHLDGKDQAEPPNFKPPAKCRIVARSREFSEWPI |
| | | VKASVEIQKYIYGLTLEERKACDPGKSSASHKAWFAKTGVN |
| | | TFGYSSVQGFNLIFGHTLGRYDGVLVKTENLNKKRAEKNER |
| | | FRAKALAEGRAEPVCPPLVTATNDTGQDVTLEDGRVVRPGQ |
| | | LLQPPGINPNIYAYQQVSPKAYVPGIIELPEEFQGYSRDPNAVI |
| | | LPLVPRDRLSIPKGQPGYVPEPHREGLTGRKDRRMRRYYETE |
| | | RGTKLKRPPLTAKGRADKANEALLVVVRIDSDWVVMDVRG |
| | | LLRNARWRRLVSKEGITLNGLLDLFTGDPVLNPKDCSVSRDT |
| | | GDPVNDPRHGVVTFCYKLGVVDVCSKDRPIKGFRTKEVLER |
| | | LTSSGTVGMVSIDLGQTNPVAAAVSRVTKGLQAETLETFTLP |
| | | DDLLGKVRAYRAKTDRMEEGFRRNALRKLTAEQQAEITRYN |
| | | DATEQQAKALVCSTYGIGPEEVPWERMTSNTTYISDHILDHG |
| | | GDPDTVFFMATKRGQNKPTLHKRKDKAWGQKFRPAISVETR |
| | | LARQAAEWELRRASLEFQKLSVWKTELCRQAVNYVMERTK |
| | | KRTQCDVIIPVIEDLPVPLFHGSGKRDPGWANFFVHKRENRW |
| | | FIDGLHKAFSELGKHRGIYVFEVCPQRTSITCPKCGHCDPDNR |
| | | DGEKFVCLSCQATLNADLDVATTNLVRVALTGKVMPRSERS |
| | | GDAQTPGPARKARTGKIKGSKPTSAPQGATQTDAKAHLSQT |
| | | GV |
| CasΦ.22 | 22 | MTPSPQIARLVETPLAAALKAHHPGKKFRSDYLKKAGKILKD |
| | | QGVEAAMAHLDGKDQAEPPNFKPPAKCRIVARSREFSEWPI |
| | | VKASVEIQKYIYGLTLEERKACDPGKSSASHKAWFAKTGVN |
| | | TFGYSSVQGFNLIFGHTLGRYDGVLVKTENLNKKRAEKNER |
| | | FRAKALAEGRAEPVCPPLVTATNDTGQDVTLEDGRVVRPGQ |
| | | LLQPPGINPNIYAYQQVSPKAYVPGIIELPEEFQGYSRDPNAVI |
| | | LPLVPRDRLSIPKGQPGYVPEPHREGLTGRKDRRMRRYYETE |
| | | RGTKLKRPPLTAKGRADKANEALLVVVRIDSDWVVMDVRG |
| | | LLRNARWRRLVSKEGITLNGLLDLFTGDPVLNPKDCSVSRDT |
| | | GDPVNDPRHGVVTFCYKLGVVDVCSKDRPIKGFRTKEVLER |
| | | LTSSGTVGMVSIDLGQTNPVAAAVSRVTKGLQAETLETFTLP |
| | | DDLLGKVRAYRAKTDRMEEGFRRNALRKLTAEQQAEITRYN |
| | | DATEQQAKALVCSTYGIGPEEVPWERMTSNTTYISDHILDHG |
| | | GDPDTVFFMATKRGQNKPTLHKRKDKAWGQKFRPAISVETR |
| | | LARQAAEWELRRASLEFQKLSVWKTELCRQAVNYVMERTK |
| | | KRTQCDVIIPVIEDLPVPLFHGSGKRDPGWANFFVHKRENRW |
| | | FIDGLHKAFSELGKHRGIYVFEVCPQRTSITCPKCGHCDPDNR |
| | | DGEKFVCLSCQATLHADLDVATTNLVRVALTGKVMPRSERS |
| | | GDAQTPGPARKARTGKIKGSKPTSAPQGATQTDAKAHLSQT |
| | | GV |
| CasΦ.23 | 23 | MKTEKPKTALTLLREEVFPGKKYRLDVLKEAGKKLSTKGRE |
| | | ATIEFLTGKDEERPQNFQPPAKTSIVAQSRPFDQWPIVQVSLA |
| | | VQKYIYGLTQSEFEANKKALYGETGKAISTESRRAWFEATGV |
| | | DNFGFTAAQGINPIFSQAVARYEGVIKKVENRNEKKLKKLTK |
| | | KNLLRLESGEEIEDFEPEATFNEEGRLLQPPGANPNIYCYQQIS |
| | | PRIYDPSDPKGVILPQIYAGYDRKPEDIISAGVPNRLAIPEGQP |
| | | GYIPEHQRAGLKTQGRIRCRASVEAKARAAILAVVHLGEDW |
| | | VVLDLRGLLRNVYWRKLASPGTLTLKGLLDFFTGGPVLDAR |
| | | RGIATFSYTLKSAAAVHAENTYKGKGTREVLLKLTENNSVA |
| | | LVTVDLGQRNPLAAMIARVSRTSQGDLTYPESVEPLTRLFLP |
| | | DPFLEEVRKYRSSYDALRLSIREAAIASLTPEQQAEIRYIEKFS |
| | | AGDAKKNVAEVFGIDPTQLPWDAMTPRTTYISDLFLRMGGD |
| | | RSRVFFEVPPKKAKKAPKKPPKKPAGPRIVKRTDGMIARLREI |
| | | RPRLSAETNKAFQEARWEGERSNVAFQKLSVRRKQFARTVV |
| | | NHLVQTAQKMSRCDTVVLGIEDLNVPFFHGRGKYQPGWEG |
| | | FFRQKKENRWLINDMHKALSERGPHRGGYVLELTPFWTSLR |
| | | CPKCGHTDSANRDGDDFVCVKCGAKLHSDLEVATANLALV |
| | | AITGQSIPRPPREQSSGKKSTGTARMKKTSGETQGKGSKACV |
| | | SEALNKIEQGTARDPVYNPLNSQVSCPAP |
| CasΦ.24 | 24 | VYNPDMKKPNNIRRIREEHFEGLCFGKDVLTKAGKIYEKDGE |
| | | EAAIDFLMGKDEEDPPNFKPPAKTTIVAQSRPFDQWPIYQVS |
| | | QAVQERVFAYTEEEFNASKEALFSGDISSKSRDFWFKTNNIS |
| | | DQGIGAQGLNTILSHAFSRYSGVIKKVENRNKKRLKKLSKKN |
| | | QLKIEEGLEILEFKPDSAFNENGLLAQPPGINPNIYGYQAVTPF |
| | | VFDPDNPGDVILPKQYEGYSRKPDDIIEKGPSRLDIPKGQPGY |
| | | VPEHQRKNLKKKGRVRLYRRTPPKTKALASILAVLQIGKDW |
| | | VLFDMRGLLRSVYMREAATPGQISAKDLLDTFTGCPVLNTR |
| | | TGEFTFCYKLRSEGALHARKIYTKGETRTLLTSLTSENNTIAL |
| | | VTVDLGQRNPAAIMISRLSRKEELSEKDIQPVSRRLLPDRYLN |
| | | ELKRYRDAYDAFRQEVRDEAFTSLCPEHQEQVQQYEALTPE |
| | | KAKNLVLKHFFGTHDPDLPWDDMTSNTHYIANLYLERGGDP |
| | | SKVFFTRPLKKDSKSKKPRKPTKRTDASISRLPEIRPKMPEDA |
| | | RKAFEKAKWEIYTGHEKFPKLAKRVNQLCREIANWIEKEAK |
| | | RLTLCDTVVVGIEDLSLPPKRGKGKFQETWQGFFRQKFENR |
| | | WVIDTLKKAIQNRAHDKGKYVLGLAPYWTSQRCPACGFIHK |
| | | SNRNGDHFKCLKCEALFHADSEVATWNLALVAVLGKGITNP |
| | | DSKKPSGQKKTGTTRKKQIKGKNKGKETVNVPPTTQEVEDII |
| | | AFFEKDDETVRNPVYKPTGT |
| CasΦ.25 | 25 | MKKPNNIRRIREEHFEGLCFGKDVLTKAGKIYEKDGEEAAID |
| | | FLMGKDEEDPPNFKPPAKTTIVAQSRPFDQWPIYQVSQAVQE |
| | | RVFAYTEEEFNASKEALFSGDISSKSRDFWFKTNNISDQGIGA |
| | | QGLNTILSHAFSRYSGVIKKVENRNKKRLKKLSKKNQLKIEE |
| | | GLEILEFKPDSAFNENGLLAQPPGINPNIYGYQAVTPFVFDPD |
| | | NPGDVILPKQYEGYSRKPDDIIEKGPSRLDIPKGQPGYVPEHQ |
| | | RKNLKKKGRVRLYRRTPPKTKALASILAVLQIGKDWVLFDM |
| | | RGLLRSVYMREAATPGQISAKDLLDTFTGCPVLNTRTGEFTF |
| | | CYKLRSEGALHARKIYTKGETRTLLTSLTSENNTIALVTVDL |
| | | GQRNPAAIMISRLSRKEELSEKDIQPVSRRLLPDRYLNELKRY |
| | | RDAYDAFRQEVRDEAFTSLCPEHQEQVQQYEALTPEKAKNL |
| | | VLKHFFGTHDPDLPWDDMTSNTHYIANLYLERGGDPSKVFF |
| | | TRPLKKDSKSKKPRKPTKRTDASISRLPEIRPKMPEDARKAFE |
| | | KAKWEIYTGHEKFPKLAKRVNQLCREIANWIEKEAKRLTLC |
| | | DTVVVGIEDLSLPPKRGKGKFQETWQGFFRQKFENRWVIDT |
| | | LKKAIQNRAHDKGKYVLGLAPYWTSQRCPACGFIHKSNRNG |
| | | DHFKCLKCEALFHADSEVATWNLALVAVLGKGITNPDSKKP |
| | | SGQKKTGTTRKKQIKGKNKGKETVNVPPTTQEVEDIIAFFEK |
| | | DDETVRNPVYKPTGT |
| CasΦ.26 | 26 | VIKTHFPAGRFRKDHQKTAGKKLKHEGEEACVEYLRNKVSD |
| | | YPPNFKPPAKGTIVAQSRPFSEWPIVRASEAIQKYVYGLTVAE |
| | | LDVFSPGTSKPSHAEWFAKTGVENYGYRQVQGLNTIFQNTV |
| | | NRFKGVLKKVENRNKKSLKRQEGANRRRVEEGLPEVPVTVE |
| | | SATDDEGRLLQPPGVNPSIYGYQGVAPRVCTDLQGFSGMSV |
| | | DFAGYRRDPDAVLVESLPEGRLSIPKGERGYVPEWQRDPERN |
| | | KFPLREGSRRQRKWYSNACHKPKPGRTSKYDPEALKKASAK |
| | | DALLVSISIGEDWAIIDVRGLLRDARRRGFTPEEGLSLNSLLG |
| | | LFTEYPVFDVQRGLITFTYKLGQVDVHSRKTVPTFRSRALLES |
| | | LVAKEEIALVSVDLGQTNPASMKVSRVRAQEGALVAEPVHR |
| | | MFLSDVLLGELSSYRKRMDAFEDAIRAQAFETMTPEQQAEIT |
| | | RVCDVSVEVARRRVCEKYSISPQDVPWGEMTGHSTFIVDAV |
| | | LRKGGDESLVYFKNKEGETLKFRDLRISRMEGVRPRLTKDTR |
| | | DALNKAVLDLKRAHPTFAKLAKQKLELARRCVNFIEREAKR |
| | | YTQCERVVFVIEDLNVGFFHGKGKRDRGWDAFFTAKKENR |
| | | WVIQALHKAFSDLGLHRGSYVIEVTPQRTSMTCPRCGHCDK |
| | | GNRNGEKFVCLQCGATLHADLEVATDNIERVALTGKAMPKP |
| | | PVRERSGDVQKAGTARKARKPLKPKQKTEPSVQEGSSDDGV |
| | | DKSPGDASRNPVYNPSDTLSI |
| CasΦ.27 | 27 | MAKAKTLAALLRELLPGQHLAPHHRWVANKLLMTSGDAAA |
| | | FVIGKSVSDPVRGSFRKDVITKAGRIFKKDGPDAAAAFLDGK |
| | | WEDRPPNFQPPAKAAIVAISRSFDEWPIVKVSCAIQQYLYALP |
| | | VQEFESSVPEARAQAHAAWFQDTGVDDCNFKSTQGLNAIFN |
| | | HGKRTYEGVLKKAQNRNDKKNLRLERINAKRAEAGQAPLV |
| | | AGPDESPTDDAGCLLHPPGINANIYCYQQVSPRPYEQSCGIQL |
| | | PPEYAGYNRLSNVAIPPMPNRLDIPQGQPGYVPEHHRHGIKK |
| | | FGRVRKRYGVVPGRNRDADGKRTRQVLTEAGAAAKARDSV |
| | | LAVIRIGDDWTVVDLRGLLRNAQWRKLVPDGGITVQGLLDL |
| | | FTGDPVIDPRRGVVTFIYKADSVGIHSEKVCRGKQSKNLLER |
| | | LCAMPEKSSTRLDCARQAVALVSVDLGQRNPVAARFSRVSL |
| | | AEGQLQAQLVSAQFLDDAMVAMIRSYREEYDRFESLVREQA |
| | | KAALSPEQLSEIVRHEADSAESVKSCVCAKFGIDPAGLSWDK |
| | | MTSGTWRIADHVQAAGGDVEWFFFKTCGKGKEIKTVRRSDF |
| | | NVAKQFRLRLSPETRKDWNDAIWELKRGNPAYVSFSKRKSE |
| | | FARRVVNDLVHRARRAVRCDEVVFAIEDLNISFFHGKGQRQ |
| | | MGWDAFFEVKQENRWFIQALHKAFVERATHKGGYVLEVAP |
| | | ARTSTTCPECRHCDPESRRGEQFCCIKCRHTCHADLEVATFNI |
| | | EQVALTGVSLPKRLSSTLL |
| CasΦ.28 | 28 | MSKEKTPPSAYAILKAKHFPDLDFEKKHKMMAGRMFKNGA |
| | | SEQEVVQYLQGKGSESLMDVKPPAKSPILAQSRPFDEWEMV |
| | | RTSRLIQETIFGIPKRGSIPKRDGLSETQFNELVASLEVGGKPM |
| | | LNKQTRAIFYGLLGIKPPTFHAMAQNILIDLAINIRKGVLKKV |
| | | DNLNEKNRKKVKRIRDAGEQDVMVPAEVTAHDDRGYLNHP |
| | | PGVNPTIPGYQGVVIPFPEGFEGLPSGMTPVDWSHVLVDYLP |
| | | HDRLSIPKGSPGYIPEWQRPLLNRHKGRRHRSWYANSLNKPR |
| | | KSRTEEAKDRQNAGKRTALIEAERLKGVLPVLMRFKEDWLII |
| | | DARGLLRNARYRGVLPEGSTLGNLIDLFSDSPRVDTRRGICTF |
| | | LYRKGRAYSTKPVKRKESKETLLKLTEKSTIALVSIDLGQTNP |
| | | LTAKLSKVRQVDGCLVAEPVLRKLIDNASEDGKEIARYRVA |
| | | HDLLRARILEDAIDLLGIYKDEVVRARSDTPDLCKERVCRFL |
| | | GLDSQAIDWDRMTPYTDFIAQAFVAKGGDPKVVTIKPNGKP |
| | | KMFRKDRSIKNMKGIRLDISKEASSAYREAQWAIQRESPDFQ |
| | | RLAVWQSQLTKRIVNQLVAWAKKCTQCDTVVLAFEDLNIG |
| | | MMHGSGKWANGGWNALFLHKQENRWFMQAFHKALTELS |
| | | AHKGIPTIEVLPHRTSITCTQCGHCHPGNRDGERFKCLKCEFL |
| | | ANTDLEIATDNIERVALTGLPMPKGERSSAKRKPGGTRKTKK |
| | | SKHSGNSPLAAE |
| CasΦ.29 | 29 | MEKAGPTSPLSVLIHKNFEGCRFQIDHLKIAGRKLAREGEAA |
| | | AIEYLLDKKCEGLPPNFQPPAKGNVIAQSRPFTEWAPYRASV |
| | | AIQKYIYSLSVDERKVCDPGSSSDSHEKWFKQTGVQNYGYT |
| | | HVQGLNLIFKHALARYDGVLKKVDNRNEKNRKKAERVNSF |
| | | RREEGLPEEVFEEEKATDETGHLLQPPGVNHSIYCYQSVRPK |
| | | PFNPRKPGGISLPEAYSGYSLKPQDELPIGSLDRLSIPPGQPGY |
| | | VPEWQRSQLTTQKHRRKRSWYSAQKWKPRTGRTSTFDPDR |
| | | LNCARAQGAILAVVRIHEDWVVFDVRGLLRNALWRELAGK |
| | | GLTVRDLLDFFTGDPVVDTKRGVVTFTYKLGKVDVHSLRTV |
| | | RGKRSKKVLEDLTLSSDVGLVTIDLGQTNVLAADYSKVTRSE |
| | | NGELLAVPLSKSFLPKHLLHEVTAYRTSYDQMEEGFRRKALL |
| | | TLTEDQQVEVTLVRDFSVESSKTKLLQLGVDVTSLPWEKMS |
| | | SNTTYISDQLLQQGADPASLFFDGERDGKPCRHKKKDRTWA |
| | | YLVRPKVSPETRKALNEALWALKNTSPEFESLSKRKIQFSRR |
| | | CMNYLLNEAKRISGCGQVVFVIEDLNVRVHHGRGKRAIGWD |
| | | NFFKPKRENRWFMQALHKAASELAIHRGMHIIEACPARSSIT |
| | | CPKCGHCDPENRCSSDREKFLCVKCGAAFHADLEVATFNLR |
| | | KVALTGTALPKSIDHSRDGLIPKGARNRKLKEPQANDEKACA |
| CasΦ.30 | 30 | MKEQSPLSSVLKSNFPGKKFLSADIRVAGRKLAQLGEAAAVE |
| | | YLSPRQRDSVPNFRPPAFCTVVAKSRPFEEWPIYKASVLLQE |
| | | QIYGMTGQEFEERCGSIPTSLSGLRQWASSVGLGAAMEGLH |
| | | VQGMNLMVKNAINRYKGVLVKVENRNKKLVEANEAKNSS |
| | | REERGLPPLRPPELGSAFGPDGRLVNPPGIDKSIRLYQGVSPV |
| | | PVVKTTGRPTVHRLDIPAGEKGHVPLWQREAGLVKEGPRRR |
| | | RMWYSNSNLKRSRKDRSAEASEARKADSVVVRVSVKEDWV |
| | | DIDVRGLLRNVAWRGIERAGESTEDLLSLFSGDPVVDPSRDS |
| | | VVFLYKEGVVDVLSKKVVGAGKSRKQLEKMVSEGPVALVS |
| | | CDLGQTNYVAARVSVLDESLSPVRSFRVDPREFPSADGSQGV |
| | | VGSLDRIRADSDRLEAKLLSEAEASLPEPVRAEIEFLRSERPSA |
| | | VAGRLCLKLGIDPRSIPWEKMGSTTSFISEALSAKGSPLALHD |
| | | GAPIKDSRFAHAARGRLSPESRKALNEALWERKSSSREYGVI |
| | | SRRKSEASRRMANAVLSESRRLTGLAVVAVNLEDLNMVSKF |
| | | FHGRGKRAPGWAGFFTPKMENRWFIRSIHKAMCDLSKHRGI |
| | | TVIESRPERTSISCPECGHCDPENRSGERFSCKSCGVSLHADFE |
| | | VATRNLERVALTGKPMPRRENLHSPEGATASRKTRKKPREA |
| | | TASTFLDLRSVLSSAENEGSGPAARAG |
| CasΦ.31 | 31 | MLPPSNKIGKSMSLKEFINKRNFKSSIIKQAGKILKKEGEEAV |
| | | KKYLDDNYVEGYKKRDFPITAKCNIVASNRKIEDFDISKFSSF |
| | | IQNYVFNLNKDNFEEFSKIKYNRKSFDELYKKIANEIGLEKPN |
| | | YENIQGEIAVIRNAINIYNGVLKKVENRNKKIQEKNQSKDPPK |
| | | LLSAFDDNGFLAERPGINETIYGYQSVRLRHLDVEKDKDIIVQ |
| | | LPDIYQKYNKKSTDKISVKKRLNKYNVDEYGKLISKRRKERI |
| | | NKDDAILCVSNFGDDWIIFDARGLLRQTYRYKLKKKGLCIKD |
| | | LLNLFTGDPIINPTKTDLKEALSLSFKDGIINNRTLKVKNYKK |
| | | CPELISELIRDKGKVAMISIDLGQTNPISYRLSKFTANNVAYIE |
| | | NGVISEDDIVKMKKWREKSDKLENLIKEEAIASLSDDEQREV |
| | | RLYENDIADNTKKKILEKFNIREEDLDFSKMSNNTYFIRDCLK |
| | | NKNIDESEFTFEKNGKKLDPTDACFAREYKNKLSELTRKKIN |
| | | EKIWEIKKNSKEYHKISIYKKETIRYIVNKLIKQSKEKSECDDII |
| | | VNIEKLQIGGNFFGGRGKRDPGWNNFFLPKEENRWFINACH |
| | | KAFSELAPHKGIIVIESDPAYTSQTCPKCENCDKENRNGEKFK |
| | | CKKCNYEANADIDVATENLEKIAKNGRRLIKNFDQLGERLPG |
| | | AEMPGGARKRKPSKSLPKNGRGAGVGSEPELINQSPSQVIA |
| CasΦ.32 | 32 | VPDKKETPLVALCKKSFPGLRFKKHDSRQAGRILKSKGEGAA |
| | | VAFLEGKGGTTQPNFKPPVKCNIVAMSRPLEEWPIYKASVVI |
| | | QKYVYAQSYEEFKATDPGKSEAGLRAWLKATRVDTDGYFN |
| | | VQGLNLIFQNARATYEGVLKKVENRNSKKVAKIEQRNEHRA |
| | | ERGLPLLTLDEPETALDETGHLRHRPGINCSVFGYQHMKLKP |
| | | YVPGSIPGVTGYSRDPSTPIAACGVDRLEIPEGQPGYVPPWDR |
| | | ENLSVKKHRRKRASWARSRGGAIDDNMLLAVVRVADDWA |
| | | LLDLRGLLRNTQYRKLLDRSVPVTIESLLNLVTNDPTLSVVK |
| | | KPGKPVRYTATLIYKQGVVPVVKAKVVKGSYVSKMLDDTT |
| | | ETFSLVGVDLGVNNLIAANALRIRPGKCVERLQAFTLPEQTV |
| | | EDFFRFRKAYDKHQENLRLAAVRSLTAEQQAEVLALDTFGP |
| | | EQAKMQVCGHLGLSVDEVPWDKVNSRSSILSDLAKERGVD |
| | | DTLYMFPFFKGKGKKRKTEIRKRWDVNWAQHFRPQLTSETR |
| | | KALNEAKWEAERNSSKYHQLSIRKKELSRHCVNYVIRTAEK |
| | | RAQCGKVIVAVEDLHHSFRRGGKGSRKSGWGGFFAAKQEG |
| | | RWLMDALFGAFCDLAVHRGYRVIKVDPYNTSRTCPECGHC |
| | | DKANRDRVNREAFICVCCGYRGNADIDVAAYNIAMVAITGV |
| | | SLRKAARASVASTPLESLAAE |
| CasΦ.33 | 33 | MSKTKELNDYQEALARRLPGVRHQKSVRRAARLVYDRQGE |
| | | DAMVAFLDGKEVDEPYTLQPPAKCHILAVSRPIEEWPIARVT |
| | | MAVQEHVYALPVHEVEKSRPETTEGSRSAWFKNSGVSNHG |
| | | VTHAQTLNAILKNAYNVYNGVIKKVENRNAKKRDSLAAKN |
| | | KSRERKGLPHFKADPPELATDEQGYLLQPPSPNSSVYLVQQH |
| | | LRTPQIDLPSGYTGPVVDPRSPIPSLIPIDRLAIPPGQPGYVPLH |
| | | DREKLTSNKHRRMKLPKSLRAQGALPVCFRVFDDWAVVDG |
| | | RGLLRHAQYRRLAPKNVSIAELLELYTGDPVIDIKRNLMTFR |
| | | FAEAVVEVTARKIVEKYHNKYLLKLTEPKGKPVREIGLVSID |
| | | LNVQRLIALAIYRVHQTGESQLALSPCLHREILPAKGLGDFDK |
| | | YKSKFNQLTEEILTAAVQTLTSAQQEEYQRYVEESSHEAKAD |
| | | LCLKYSITPHELAWDKMTSSTQYISRWLRDHGWNASDFTQIT |
| | | KGRKKVERLWSDSRWAQELKPKLSNETRRKLEDAKHDLQR |
| | | ANPEWQRLAKRKQEYSRHLANTVLSMAREYTACETVVIAIE |
| | | NLPMKGGFVDGNGSRESGWDNFFTHKKENRWMIKDIHKAL |
| | | SDLAPNRGVHVLEVNPQYTSQTCPECGHRDKANRDPIQRERF |
| | | CCTHCGAQRHADLEVATHNIAMVATTGKSLTGKSLAPQRLQ |
| | | EAAE |
| CasΦ.41 | 34 | VLLSDRIQYTDPSAPIPAMTVVDRRKIKKGEPGYVPPFMRKN |
| | | LSTNKHRRMRLSRGQKEACALPVGLRLPDGKDGWDFIIFDG |
| | | RALLRACRRLRLEVTSMDDVLDKFTGDPRIQLSPAGETIVTC |
| | | MLKPQHTGVIQQKLITGKMKDRLVQLTAEAPIAMLTVDLGE |
| | | HNLVACGAYTVGQRRGKLQSERLEAFLLPEKVLADFEGYRR |
| | | DSDEHSETLRHEALKALSKRQQREVLDMLRTGADQARESLC |
| | | YKYGLDLQALPWDKMSSNSTFIAQHLMSLGFGESATHVRYR |
| | | PKRKASERTILKYDSRFAAEEKIKLTDETRRAWNEAIWECQR |
| | | ASQEFRCLSVRKLQLARAAVNWTLTQAKQRSRCPRVVVVV |
| | | EDLNVRFMHGGGKRQEGWAGFFKARSEKRWFIQALHKAYT |
| | | ELPTNRGIHVMEVNPARTSITCTKCGYCDPENRYGEDFHCRN |
| | | PKCKVRGGHVANADLDIATENLARVALSGPMPKAPKLK |
| CasΦ.34 | 35 | MTPSFGYQMIIVTPIHHASGAWATLRLLFLNPKTSGVMLGMT |
| | | KTKSAFALMREEVFPGLLFKSADLKMAGRKFAKEGREAAIE |
| | | YLRGKDEERPANFKPPAKGDIIAQSRPFDQWPIVQVSQAIQK |
| | | YIFGLTKAEFDATKTLLYGEGNHPTTESRRRWFEATGVPDFG |
| | | FTSAQGLNAIFSSALARYEGVIQKVENRNEKRLKKLSEKNQR |
| | | LVEEGHAVEAYVPETAFHTLESLKALSEKSLVPLDDLMDKID |
| | | RLAQPPGINPCLYGYQQVAPYIYDPENPRGVVLPDLYLGYCR |
| | | KPDDPITACPNRLDIPKGQPGYIPEHQRGQLKKHGRVRRFRY |
| | | TNPQAKARAKAQTAILAVLRIDEDWVVMDLRGLLRNVYFRE |
| | | VAAPGELTARTLLDTFTGCPVLNLRSNVVTFCYDIESKGALH |
| | | AEYVRKGWATRNKLLDLTKDGQSVALLSVDLGQRHPVAVM |
| | | ISRLKRDDKGDLSEKSIQVVSRTFADQYVDKLKRYRVQYDA |
| | | LRKEIYDAALVSLPPEQQAEIRAYEAFAPGDAKANVLSVMFQ |
| | | GEVSPDELPWDKMNTNTHYISDLYLRRGGDPSRVFFVPQPST |
| | | PKKNAKKPPAPRKPVKRTDENVSHMPEFRPHLSNETREAFQ |
| | | KAKWTMERGNVRYAQLSRFLNQIVREANNWLVSEAKKLTQ |
| | | CQTVVWAIEDLHVPFFHGKGKYHETWDGFFRQKKEDRWFV |
| | | NVFHKAISERAPNKGEYVMEVAPYRTSQRCPVCGFVDADNR |
| | | HGDHFKCLRCGVELHADLEVATWNIALVAVQGHGIAGPPRE |
| | | QSCGGETAGTARKGKNIKKNKGLADAVTVEAQDSEGGSKK |
| | | DAGTARNPVYIPSESQVNCPAP |
| CasΦ.35 | 36 | MKPKTPKPPKTPVAALIDKHFPGKRFRASYLKSVGKKLKNQ |
| | | GEDVAVRFLTGKDEERPPNFQPPAKSNIVAQSRPIEEWPIHKV |
| | | SVAVQEYVYGLTVAEKEACSDAGESSSSHAAWFAKTGVENF |
| | | GYTSVQGLNKIFPPTFNRFDGVIKKVENRNEKKRQKATRINE |
| | | AKRNKGQSEDPPEAEVKATDDAGYLLQPPGINHSVYGYQSIT |
| | | LCPYTAEKFPTIKLPEEYAGYHSNPDAPIPAGVPDRLAIPEGQ |
| | | PGHVPEEHRAGLSTKKHRRVRQWYAMANWKPKPKRTSKPD |
| | | YDRLAKARAQGALLIVIRIDEDWVVVDARGLLRNVRWRSLG |
| | | KREITPNELLDLFTGDPVLDLKRGVVTFTYAEGVVNVCSRST |
| | | TKGKQTKVLLDAMTAPRDGKKRQIGMVAVDLGQTNPIAAE |
| | | YSRVGKNAAGTLEATPLSRSTLPDELLREIALYRKAHDRLEA |
| | | QLREEAVLKLTAEQQAENARYVETSEEGAKLALANLGVDTS |
| | | TLPWDAMTGWSTCISDHLINHGGDTSAVFFQTIRKGTKKLET |
| | | IKRKDSSWADIVRPRLTKETREALNDFLWELKRSHEGYEKLS |
| | | KRLEELARRAVNHVVQEVKWLTQCQDIVIVIEDLNVRNFHG |
| | | GGKRGGGWSNFFTVKKENRWFMQALHKAFSDLAAHRGIPV |
| | | LEVYPARTSITCLGCGHCDPENRDGEAFVCQQCGATFHADLE |
| | | VATRNIARVALTGEAMPKAPAREQPGGAKKRGTSRRRKLTE |
| | | VAVKSAEPTIHQAKNQQLNGTSRDPVYKGSELPAL |
| CasΦ.43 | 37 | MSEITDLLKANFKGKTFKSADMRMAGRILKKSGAQAVIKYL |
| | | SDKGAVDPPDFRPPAKCNIIAQSRPFDEWPICKASMAIQQHIY |
| | | GLTKNEFDESSPGTSSASHEQWFAKTGVDTHGFTHVQGLNLI |
| | | FQHAKKRYEGVIKKVENYNEKERKKFEGINERRSKEGMPLL |
| | | EPRLRTAFGDDGKFAEKPGVNPSIYLYQQTSPRPYDKTKHPY |
| | | VHAPFELKEITTIPTQDDRLKIPFGAPGHVPEKHRSQLSMAKH |
| | | KRRRAWYALSQNKPRPPKDGSKGRRSVRDLADLKAASLAD |
| | | AIPLVSRVGFDWVVIDGRGLLRNLRWRKLAHEGMTVEEML |
| | | GFFSGDPVIDPRRNVATFIYKAEHATVKSRKPIGGAKRAREEL |
| | | LKATASSDGVIRQVGLISVDLGQTNPVAYEISRMHQANGELV |
| | | AEHLEYGLLNDEQVNSIQRYRAAWDSMNESFRQKAIESLSM |
| | | EAQDEIMQASTGAAKRTREAVLTMFGPNATLPWSRMSSNTT |
| | | CISDALIEVGKEEETNFVTSNGPRKRTDAQWAAYLRPRVNPE |
| | | TRALLNQAVWDLMKRSDEYERLSKRKLEMARQCVNFVVAR |
| | | AEKLTQCNNIGIVLENLVVRNFHGSGRRESGWEGFFEPKREN |
| | | RWFMQVLHKAFSDLAQHRGVMVFEVHPAYSSQTCPACRYV |
| | | DPKNRSSEDRERFKCLKCGRSFNADREVATFNIREIARTGVG |
| | | LPKPDCERSRGVQTTGTARNPGRSLKSNKNPSEPKRVLQSKT |
| | | RKKITSTETQNEPLATDLKT |
| CasΦ.44 | 38 | MTPKTESPLSALCKKHFPGKRFRTNYLKDAGKILKKHGEDA |
| | | VVAFLSDKQEDEPANFCPPAKVHILAQSRPFEDWPINLASKAI |
| | | QTYVYGLTADERKTCEPGTSKESHDRWFKETGVDHHGFTSV |
| | | QGLNLIFKHTLNRYDGVIKKVETRNEKRRSSVVRINEKKAAE |
| | | GLPLIAAEAEETAFGEDGRLLQPPGVNHSIYCFQQVSPQPYSS |
| | | KKHPQVVLPHAVQGVDPDAPIPVGRPNRLDIPKGQPGYVPE |
| | | WQRPHLSMKCKRVRMWYARANWRRKPGRRSVLNEARLKE |
| | | ASAKGALPIVLVIGDDWLVMDARGLLRSVFWRRVAKPGLSL |
| | | SELLNVTPTGLFSGDPVIDPKRGLVTFTSKLGVVAVHSRKPTR |
| | | GKKSKDLLLKMTKPTDDGMPRHVGMVAIDLGQTNPVAAEY |
| | | SRVVQSDAGTLKQEPVSRGVLPDDLLKDVARYRRAYDLTEE |
| | | SIRQEAIALLSEGHRAEVTKLDQTTANETKRLLVDRGVSESLP |
| | | WEKMSSNTTYISDCLVALGKTDDVFFVPKAKKGKKETGIAV |
| | | KRKDHGWSKLLRPRTSPEARKALNENQWAVKRASPEYERLS |
| | | RRKLELGRRCVNHIIQETKRWTQCEDIVVVLEDLNVGFFHGS |
| | | GKRPDGWDNFFVSKRENRWFIQVLHKAFGDLATHRGTHVIE |
| | | VHPARTSITCIKCGHCDAGNRDGESFVCLASACGDRRHADLE |
| | | VATRNVARVAITGERMPPSEQARDVQKAGGARKRKPSARN |
| | | VKSSYPAVEPAPASP |
| CasΦ.36 | 39 | MSDNKMKKLSKEEKPLTPLQILIRKYIDKSQYPSGFKTTIIKQ |
| | | AGVRIKSVKSEQDEINLANWIISKYDPTYIKRDFNPSAKCQIIA |
| | | TSRSVADFDIVKMSNKVQEIFFASSHLDKNVFDIGKSKSDHD |
| | | SWFERNNVDRGIYTYSNVQGMNLIFSNTKNTYLGVAVKAQN |
| | | KFSSKMKRIQDINNFRITNHQSPLPIPDEIKIYDDAGFLLNPPG |
| | | VNPNIFGYQSCLLKPLENKEIISKTSFPEYSRLPADMIEVNYKI |
| | | SNRLKFSNDQKGFIQFKDKLNLFKINSQELFSKRRRLSGQPIL |
| | | LVASFGDDWVVLDGRGLLRQVYYRGIAKPGSITISELLGFFT |
| | | GDPIVDPIRGVVSLGFKPGVLSQETLKTTSARIFAEKLPNLVL |
| | | NNNVGLMSIDLGQTNPVSYRLSEITSNMSVEHICSDFLSQDQI |
| | | SSIEKAKTSLDNLEEEIAIKAVDHLSDEDKINFANFSKLNLPED |
| | | TRQSLFEKYPELIGSKLDFGSMGSGTSYIADELIKFENKDAFY |
| | | PSGKKKFDLSFSRDLRKKLSDETRKSYNDALFLEKRTNDKYL |
| | | KNAKRRKQIVRTVANSLVSKIEELGLTPVINIENLAMSGGFFD |
| | | GRGKREKGWDNFFKVKKENRWVMKDFHKAFSELSPHHGVI |
| | | VIESPPYCTSVTCTKCNFCDKKNRNGHKFTCQRCGLDANAD |
| | | LDIATENLEKVAISGKRMPGSERSSDERKVAVARKAKSPKGK |
| | | AIKGVKCTITDEPALLSANSQDCSQSTS |
| CasΦ.37 | 40 | MALSLAEVRERHFKGLRFRSSYLKRAGKILKKEGEAACVAY |
| | | LTGKDEESPPNFKPPAKCDVVAQSRPFEEWPIVQASVAVQSY |
| | | VYGLTKEAFEAFNPGTTKQSHEACLAATGIDTCGYSNVQGL |
| | | NLIFRQAKNRYEGVITKVENRNKKAKKKLTRKNEWRQKNG |
| | | HSELPEAPEELTFNDEGRLLQPPGINPSLYTYQQISPTPWSPKD |
| | | SSILPPQYAGYERDPNAPIPFGVAKDRLTIASGCPGYIPEWMR |
| | | TAGEKTNPRTQKKFMHPGLSTRKNKRMRLPRSVRSAPLGAL |
| | | LVTIHLGEDWLVLDVRGLLRNARWRGVAPKDISTQGLLNLF |
| | | TGDPVIDTRRGVVTFTYKPETVGIHSRTWLYKGKQTKEVLEK |
| | | LTQDQTVALVAIDLGQTNPVSAAASRVSRSGENLSIETVDRF |
| | | FLPDELIKELRLYRMAHDRLEERIREESTLALTEAQQAEVRAL |
| | | EHVVRDDAKNKVCAAFNLDAASLPWDQMTSNTTYLSEAIL |
| | | AQGVSRDQVFFTPNPKKGSKEPVEVMRKDRAWVYAFKAKL |
| | | SEETRKAKNEALWALKRASPDYARLSKRREELCRRSVNMVI |
| | | NRAKKRTQCQVVIPVLEDLNIGFFHGSGKRLPGWDNFFVAK |
| | | KENRWLMNGLHKSFSDLAVHRGFYVFEVMPHRTSITCPACG |
| | | HCDSENRDGEAFVCLSCKRTYHADLDVATHNLTQVAGTGLP |
| | | MPEREHPGGTKKPGGSRKPESPQTHAPILHRTDYSESADRLG |
| | | S |
| CasΦ.45 | 41 | QAVIKYLSDKGAVDPPDFRPPAKCNIIAQSRPFDEWPICKASM |
| | | AIQQHIYGLTKNEFDESSPGTSSASHEQWFAKTGVDTHGFTH |
| | | VQGLNLIFQHAKKRYEGVIKKVENYNEKERKKFEGINERRSK |
| | | EGMPLLEPRLRTAFGDDGKFAEKPGVNPSIYLYQQTSPRPYD |
| | | KTKHPYVHAPFELKEITTIPTQDDRLKIPFGAPGHVPEKHRSQ |
| | | LSMAKHKRRRAWYALSQNKPRPPKDGSKGRRSVRDLADLK |
| | | AASLADAIPLVSRVGFDWVVIDGRGLLRNLRWRKLAHEGMT |
| | | VEEMLGFFSGDPVIDPRRNVATFIYKAEHATVKSRKPIGGAK |
| | | RAREELLKATASSDGVIRQVGLISVDLGQTNPVAYEISRMHQ |
| | | ANGELVAEHLEYGLLNDEQVNSIQRYRAAWDSMNESFRQK |
| | | AIESLSMEAQDEIMQASTGAAKRTREAVLTMFGPNATLPWS |
| | | RMSSNTTCISDALIEVGKEEETNFVTSNGPRKRTDAQWAAYL |
| | | RPRVNPETRALLNQAVWDLMKRSDEYERLSKRKLEMARQC |
| | | VNFVVARAEKLTQCNNIGIVLENLVVRNFHGSGRRESGWEG |
| | | FFEPKRENRWFMQVLHKAFSDLAQHRGVMVFEVHPAYSSQ |
| | | TCPACRYVDPKNRSSEDRERFKCLKCGRSFNADREVATFNIR |
| | | EIARTGVGLPKPDCERSRDVQTPGTARKSGRSLKSQDNLSEP |
| | | KRVLQSKTRKKITSTETQNEPLATDLKT |
| CasΦ.38 | 42 | MIKEQSELSKLIEKYYPGKKFYSNDLKQAGKHLKKSEHLTAK |
| | | ESEELTVEFLKSCKEKLYDFRPPAKALIISTSRPFEEWPIYKAS |
| | | ESIQKYIYSLTKEELEKYNISTDKTSQENFFKESLIDNYGFANV |
| | | SGLNLIFQHTKAIYDGVLKKVNNRNNKILKKYKRKIEEGIEID |
| | | SPELEKAIDESGHFINPPGINKNIYCYQQVSPTIFNSFKETKIICP |
| | | FNYKRNPNDIIQKGVIDRLAIPFGEPGYIPDHQRDKVNKHKK |
| | | RIRKYYKNNENKNKDAILAKINIGEDWVLFDLRGLLRNAYW |
| | | RKLIPKQGITPQQLLDMFSGDPVIDPIKNNITFIYKESIIPIHSESI |
| | | IKTKKSKELLEKLTKDEQIALVSIDLGQTNPVAARFSRLSSDL |
| | | KPEHVSSSFLPDELKNEICRYREKSDLLEIEIKNKAIKMLSQEQ |
| | | QDEIKLVNDISSEELKNSVCKKYNIDNSKIPWDKMNGFTTFIA |
| | | DEFINNGGDKSLVYFTAKDKKSKKEKLVKLSDKKIANSFKPK |
| | | ISKETREILNKITWDEKISSNEYKKLSKRKLEFARRATNYLIN |
| | | QAKKATRLNNVVLVVEDLNSKFFHGSGKREDGWDNFFIPKK |
| | | ENRWFIQALHKSLTDVSIHRGINVIEVRPERTSITCPKCGCCD |
| | | KENRKGEDFKCIKCDSVYHADLEVATFNIEKVAITGESMPKP |
| | | DCERLGGEESIG |
| CasΦ.39 | 43 | VAFLDGKEVDEPYTLQPPAKCHILAVSRPIEEWPIARVTMAV |
| | | QEHVYALPVHEVEKSRPETTEGSRSAWFKNSGVSNHGVTHA |
| | | QTLNAILKNAYNVYNGVIKKVENRNAKKRDSLAAKNKSRER |
| | | KGLPHFKADPPELATDEQGYLLQPPSPNSSVYLVQQHLRTPQ |
| | | IDLPSGYTGPVVDPRSPIPSLIPIDRLAIPPGQPGYVPLHDREKL |
| | | TSNKHRRMKLPKSLRAQGALPVCFRVFDDWAVVDGRGLLR |
| | | HAQYRRLAPKNVSIAELLELYTGDPVIDIKRNLMTFRFAEAV |
| | | VEVTARKIVEKYHNKYLLKLTEPKGKPVREIGLVSIDLNVQR |
| | | LIALAIYRVHQTGESQLALSPCLHREILPAKGLGDFDKYKSKF |
| | | NQLTEEILTAAVQTLTSAQQEEYQRYVEESSHEAKADLCLKY |
| | | SITPHELAWDKMTSSTQYISRWLRDHGWNASDFTQITKGRK |
| | | KVERLWSDSRWAQELKPKLSNETRRKLEDAKHDLQRANPE |
| | | WQRLAKRKQEYSRHLANTVLSMAREYTACETVVIAIENLPM |
| | | KGGFVDGNGSRESGWDNFFTHKKENRWMIKDIHKALSDLAP |
| | | NRGVHVLEVNPQYTSQTCPECGHRDKANRDPIQRERFCCTH |
| | | CGAQRHADLEVATHNIAMVATTGKSLTGKSLAPQRLQ |
| CasΦ.42 | 44 | LEIPEGEPGHVPWFQRMDIPEGQIGHVNKIQRFNFVHGKNSG |
| | | KVKFSDKTGRVKRYHHSKYKDATKPYKFLEESKKVSALDSI |
| | | LAIITIGDDWVVFDIRGLYRNVFYRELAQKGLTAVQLLDLFT |
| | | GDPVIDPKKGIITFSYKEGVVPVFSQKIVSRFKSRDTLEKLTSQ |
| | | GPVALLSVDLGQNEPVAARVCSLKNINDKIALDNSCRIPFLD |
| | | DYKKQIKDYRDSLDELEIKIRLEAINSLDVNQQVEIRDLDVFS |
| | | ADRAKASTVDMFDIDPNLISWDSMSDARFSTQISDLYLKNGG |
| | | DESRVYFEINNKRIKRSDYNISQLVRPKLSDSTRKNLNDSIWK |
| | | LKRTSEEYLKLSKRKLELSRAVVNYTIRQSKLLSGINDIVIILE |
| | | DLDVKKKFNGRGIRDIGWDNFFSSRKENRWFIPAFHKSFSEL |
| | | SSNRGLCVIEVNPAWTSATCPDCGFCSKENRDGINFTCRKCG |
| | | VSYHADIDVATLNIARVAVLGKPMSGPADRERLGGTKKPRV |
| | | ARSRKDMKRKDISNGTVEVMVTA |
| CasΦ.46 | 45 | IPSFGYLDRLKIAKGQPGYIPEWQRETINPSKKVRRYWATNH |
| | | EKIRNAIPLVVFIGDDWVIIDGRGLLRDARRRKLADKNTTIEQ |
| | | LLEMVSNDPVIDSTRGIATLSYVEGVVPVRSFIPIGEKKGREY |
| | | LEKSTQKESVTLLSVDIGQINPVSCGVYKVSNGCSKIDFLDKF |
| | | FLDKKHLDAIQKYRTLQDSLEASIVNEALDEIDPSFKKEYQNI |
| | | NSQTSNDVKKSLCTEYNIDPEAISWQDITAHSTLISDYLIDNNI |
| | | TNDVYRTVNKAKYKTNDFGWYKKFSAKLSKEAREALNEKI |
| | | WELKIASSKYKKLSVRKKEIARTIANDCVKRAETYGDNVVV |
| | | AMESLTKNNKVMSGRGKRDPGWHNLGQAKVENRWFIQAIS |
| | | SAFEDKATHHGTPVLKVNPAYTSQTCPSCGHCSKDNRSSKD |
| | | RTIFVCKSCGEKFNADLDVATYNIAHVAFSGKKLSPPSEKSSA |
| | | TKKPRSARKSKKSRKS |
| CasΦ.47 | 46 | SPIEKLLNGLLVKITFGNDWIICDARGLLDNVQKGIIHKSYFT |
| | | NKSSLVDLIDLFTCNPIVNYKNNVVTFCYKEGVVDVKSFTPI |
| | | KSGPKTQENLIKKLKYSRFQNEKDACVLGVGVDVGVTNPFA |
| | | INGFKMPVDESSEWVMLNEPLFTIETSQAFREEIMAYQQRTD |
| | | EMNDQFNQQSIDLLPPEYKVEFDNLPEDINEVAKYNLLHTLN |
| | | IPNNFLWDKMSNTTQFISDYLIQIGRGTETEKTITTKKGKEKIL |
| | | TIRDVNWFNTFKPKISEETGKARTEIKRDLQKNSDQFQKLAK |
| | | SREQSCRTWVNNVTEEAKIKSGCPLIIFVIEALVKDNRVFSGK |
| | | GHRAIGWHNFGKQKNERRWWVQAIHKAFQEQGVNHGYPVI |
| | | LCPPQYTSQTCPKCNHVDRDNRSGEKFKCLKYGWIGNADLD |
| | | VGAYNIARVAITGKALSKPLEQKKIKKAKNKT |
| CasΦ.48 | 47 | LLDNVQKGIIHKSYFTNKSSLVDLIDLFTCNPIVNYKNNVVTF |
| | | CYKEGVVDVKSFTPIKSGPKTQENLIKKLKYSRFQNEKDACV |
| | | LGVGVDVGVTNPFAINGFKMPVDESSEWVMLNEPLFTIETSQ |
| | | AFREEIMAYQQRTDEMNDQFNQQSIDLLPPEYKVEFDNLPED |
| | | INEVAKYNLLHTLNIPNNFLWDKMSNTTQFISDYLIQIGRGTE |
| | | TEKTITTKKGKEKILTIRDVNWFNTFKPKISEETGKARTEIKR |
| | | DLQKNSDQFQKLAKSREQSCRTWVNNVTEEAKIKSGCPLIIF |
| | | VIEALVKDNRVFSGKGHRAIGWHNFGKQKNERRWWVQAIH |
| | | KAFQEQGVNHGYPVILCPPQYTSQTCPKCNHVDRDNRSGEK |
| | | FKCLKYGWIGNADLDVGAYNIARVAITGKALSKPLEQKKIK |
| | | KAKNKT |
| CasΦ.49 | 105 | MIKPTVSQFLTPGFKLIRNHSRTAGLKLKNEGEEACKKFVRE |
| | | NEIPKDECPNFQGGPAIANIIAKSREFTEWEIYQSSLAIQEVIFT |
| | | LPKDKLPEPILKEEWRAQWLSEHGLDTVPYKEAAGLNLIIKN |
| | | AVNTYKGVQVKVDNKNKNNLAKINRKNEIAKLNGEQEISFE |
| | | EIKAFDDKGYLLQKPSPNKSIYCYQSVSPKPFITSKYHNVNLP |
| | | EEYIGYYRKSNEPIVSPYQFDRLRIPIGEPGYVPKWQYTFLSK |
| | | KENKRRKLSKRIKNVSPILGIICIKKDWCVFDMRGLLRTNHW |
| | | KKYHKPTDSINDLFDYFTGDPVIDTKANVVRFRYKMENGIV |
| | | NYKPVREKKGKELLENICDQNGSCKLATVDVGQNNPVAIGL |
| | | FELKKVNGELTKTLISRHPTPIDFCNKITAYRERYDKLESSIKL |
| | | DAIKQLTSEQKIEVDNYNNNFTPQNTKQIVCSKLNINPNDLP |
| | | WDKMISGTHFISEKAQVSNKSEIYFTSTDKGKTKDVMKSDY |
| | | KWFQDYKPKLSKEVRDALSDIEWRLRRESLEFNKLSKSREQ |
| | | DARQLANWISSMCDVIGIENLVKKNNFFGGSGKREPGWDNF |
| | | YKPKKENRWWINAIHKALTELSQNKGKRVILLPAMRTSITCP |
| | | KCKYCDSKNRNGEKFNCLKCGIELNADIDVATENLATVAITA |
| | | QSMPKPTCERSGDAKKPVRARKAKAPEFHDKLAPSYTVVLR |
| | | EAVKRPAATKKAGQAKKKKEF |
| | | (Underlined sequence is Nuclear Localization Signal; SEQ ID |
| | | NO: 106) |
| CasΦ.12 | 107 | SNAPKKKRKVGIHGVPAAMIKPTVSQFLTPGFKLIRNHSRT |
| with NLS | | AGLKLKNEGEEACKKFVRENEIPKDECPNFQGGPAIANIIAKS |
| Signals | | REFTEWEIYQSSLAIQEVIFTLPKDKLPEPILKEEWRAQWLSE |
| | | HGLDTVPYKEAAGLNLIIKNAVNTYKGVQVKVDNKNKNNL |
| | | AKINRKNEIAKLNGEQEISFEEIKAFDDKGYLLQKPSPNKSIY |
| | | CYQSVSPKPFITSKYHNVNLPEEYIGYYRKSNEPIVSPYQFDR |
| | | LRIPIGEPGYVPKWQYTFLSKKENKRRKLSKRIKNVSPILGIICI |
| | | KKDWCVFDMRGLLRTNHWKKYHKPTDSINDLFDYFTGDPVI |
| | | DTKANVVRFRYKMENGIVNYKPVREKKGKELLENICDQNGS |
| | | CKLATVDVGQNNPVAIGLFELKKVNGELTKTLISRHPTPIDFC |
| | | NKITAYRERYDKLESSIKLDAIKQLTSEQKIEVDNYNNNFTPQ |
| | | NTKQIVCSKLNINPNDLPWDKMISGTHFISEKAQVSNKSEIYF |
| | | TSTDKGKTKDVMKSDYKWFQDYKPKLSKEVRDALSDIEWR |
| | | LRRESLEFNKLSKSREQDARQLANWISSMCDVIGIENLVKKN |
| | | NFFGGSGKREPGWDNFYKPKKENRWWINAIHKALTELSQNK |
| | | GKRVILLPAMRTSITCPKCKYCDSKNRNGEKFNCLKCGIELN |
| | | ADIDVATENLATVAITAQSMPKPTCERSGDAKKPVRARKAK |
| | | APEFHDKLAPSYTVVLREAVKRPAATKKAGQAKKKKEF |
| | | (Underlined sequences Nuclear Localization Signals; SEQ ID |
| | | NO: 112 and 106) |

[0136] In some embodiments, any of the programmable CasΦ nucleases of the present disclosure (e.g., any one of SEQ TD NO: 1 to 47, 105, or 107, or fragments or variants thereof) may include a nuclear localization signal (NLS). In some cases, one or more NLS are fused or linked to the N-terminus of the programmable CasΦ nuclease. In some embodiments, one or more NLS are fused or linked to the C-terminus of the programmable CasΦ nuclease. In some embodiments, one or more NLS are fused or linked to the N-terminus and the C-terminus of the programmable CasΦ nuclease. In some embodiments, the link between the NLS and the programmable CasΦ nuclease comprises a tag. In some cases, said NLS may have a sequence of KRPAATKKAGQAKKKKEF (SEQ ID NO: 106). The NLS can be selected to match the cell type of interest, for example several NLSs are known to be functional in different types of eukaryotic cell e.g. in mammalian cells. Suitable NLSs include the SV40 large T antigen NLS (PKKKRKV, SEQ ID NO: 110) and the c-Myc NLS (PAAKRVKLD,SEQ ID NO: 111). In some embodiments, an NLS may be the SV40 large T antigen NLS or the c-Myc NLS. NLSs that are functional in plant cells are described in Chang et al., (Plant Signal Behav. 2013 October; 8(10):e25976). In some embodiments, an NLS sequence can be selected from the following consensus sequences: KR(K/R)R, K(K/R)RK; (P/R)XXKR(\hat{ }de)(K/R); KRX(W/F/Y)XXAF (SEQ ID NO: 2489); (R/P)XXKR(K/R)(\hat{ }de); LGKR(K/R)(W/F/Y) (SEQ ID NO: 2490); KRX10-12K(KR)(KR) or KRX10-12K(KR)X(K/R).

[0137] In some embodiments, the nucleoplasmin NLS (KRPAATKKAGQAKKKKEF (SEQ ID NO: 106)) is linked or fused to the C-terminus of the programmable CasΦ nuclease. In some embodiments, the SV40 NLS (PKKKRKVGIHGVPAA) (SEQ ID NO: 112) is linked or fused to the N-terminus of the programmable CasΦ nuclease. In preferred embodiments, the nucleoplasmin NLS (SEQ ID NO: 106) is linked or fused to the C-terminus of the programmable CasΦ nuclease and the SV40 NLS (SEQ ID NO: 112) is linked or fused to the N-terminus of the programmable CasΦ nuclease.

[0138] In some embodiments, the CasΦ nuclease comprises more than 200 amino acids, more than 300 amino acids, more than 400 amino acids. In some embodiments, the CasΦ nuclease comprises less than 1500 amino acids, less than 1000 amino acids or less than 900 amino acids. In some embodiments, the CasΦ nuclease comprises between 200 and 1500 amino acids, between 300 and 1000 amino acids, or between 400 and 900 amino acids. In preferred embodiments, the CasΦ nuclease comprises between 400 and 900 amino acids.

[0139] “Percent identity” and “% identity” can refer to the extent to which two sequences (nucleotide or amino acid) have the same residue at the same positions in an alignment. For example, “an amino acid sequence is X % identical to SEQ ID NO: Y” can refer to % identity of the amino acid sequence to SEQ ID NO: Y and is elaborated as X % of residues in the amino acid sequence are identical to the residues of sequence disclosed in SEQ ID NO: Y. Generally, computer programs can be employed for such calculations. Illustrative programs that compare and align pairs of sequences, include ALIGN (Myers and Miller, Comput Appl Biosci. 1988 March; 4(1):11-7), FASTA (Pearson and Lipman, Proc Natl Acad Sci USA. 1988 April; 85(8):2444-8; Pearson, Methods Enzymol. 1990; 183:63-98) and gapped BLAST (Altschul et al., Nucleic Acids Res. 1997 Sep. 1; 25(17):3389-40), BLASTP, BLASTN, or GCG (Devereux et al., Nucleic Acids Res. 1984 Jan. 11; 12(1 Pt 1):387-95).

[0140] A CasΦ polypeptide or a variant thereof can comprise at least 70%, at least 75%, at least 80%, at least 85%, at least 90%, at least 92%, at least 95%, at least 97%, at least 98%, at least 99%, or 100% sequence identity with any one of SEQ ID NO: 1 to SEQ ID NO: 47, SEQ ID NO. 105, and SEQ ID NO: 107.

[0141] A programmable nuclease or nickase of the present disclosure can comprise at least 70%, at least 75%, at least 80%, at least 85%, at least 90%, at least 92%, at least 95%, at least 97%, at least 98%, at least 99%, or 100% sequence identity with any one of SEQ ID NO: 1 to SEQ ID NO: 47, SEQ ID NO. 105, and SEQ ID NO: 107.

[0142] Compositions and methods of the disclosure can comprise a programmable nuclease comprising at least 70%, at least 75%, at least 80%, at least 85%, at least 90%, at least 92%, at least 95%, at least 97%, at least 98%, at least 99%, or 100% sequence identity to SEQ ID NO: 2.

[0143] Compositions and methods of the disclosure can comprise a programmable nuclease comprising at least 70%, at least 75%, at least 80%, at least 85%, at least 90%, at least 92%, at least 95%, at least 97%, at least 98%, at least 99%, or 100% sequence identity to SEQ ID NO: 4.

[0144] Compositions and methods of the disclosure can comprise a programmable nuclease comprising at least 70%, at least 75%, at least 80%, at least 85%, at least 90%, at least 92%, at least 95%, at least 97%, at least 98%, at least 99%, or 100% sequence identity to SEQ ID NO: 11.

[0145] Compositions and methods of the disclosure can comprise a programmable nuclease comprising at least 70%, at least 75%, at least 80%, at least 85%, at least 90%, at least 92%, at least 95%, at least 97%, at least 98%, at least 99%, or 100% sequence identity to SEQ ID NO: 17.

[0146] Compositions and methods of the disclosure can comprise a programmable nuclease comprising at least 70%, at least 75%, at least 80%, at least 85%, at least 90%, at least 92%, at least 95%, at least 97%, at least 98%, at least 99%, or 100% sequence identity to SEQ ID NO: 18.

[0147] Compositions and methods of the disclosure can comprise a programmable polypeptide or nuclease comprising at least 70%, at least 75%, at least 80%, at least 85%, at least 90%, at least 92%, at least 95%, at least 97%, at least 98%, at least 99%, or 100% sequence identity to SEQ ID NO: 12.

[0148] Compositions and methods of the disclosure can comprise a programmable polypeptide or nuclease comprising at least 70%, at least 75%, at least 80%, at least 85%, at least 90%, at least 92%, at least 95%, at least 97%, at least 98%, at least 99%, or 100% sequence identity to SEQ ID NO: 105.

[0149] Compositions and methods of the disclosure can comprise a programmable polypeptide or nuclease comprising at least 70%, at least 75%, at least 80%, at least 85%, at least 90%, at least 92%, at least 95%, at least 97%, at least 98%, at least 99%, or 100% sequence identity to SEQ ID NO: 107.

[0150] In some embodiments, the programmable nuclease comprises a sequence with at least 70% identity to SEQ ID NO: 2. In some embodiments, the programmable nuclease comprises a sequence with at least 75% identity to SEQ ID NO: 2. In some embodiments, the programmable nuclease comprises a sequence with at least 80% identity to SEQ ID NO: 2. In some embodiments, the programmable nuclease comprises a sequence with at least 85% identity to SEQ ID NO: 2. In some embodiments, the programmable nuclease comprises a sequence with at least 90% identity to SEQ ID NO: 2. In some embodiments, the programmable nuclease comprises a sequence with at least 92% identity to SEQ ID NO: 2. In some embodiments, the programmable nuclease comprises a sequence with at least 95% identity to SEQ ID NO: 2. In some embodiments, the programmable nuclease comprises a sequence with at least 97% identity to SEQ ID NO: 2. In some embodiments, the programmable nuclease comprises a sequence with at least 98% identity to SEQ ID NO: 2. In some embodiments, the programmable nuclease comprises a sequence with at least 99% identity to SEQ ID NO: 2. In some embodiments, the programmable nuclease comprises a sequence of SEQ ID NO: 2.

[0151] In some embodiments, the programmable nuclease comprises a sequence with at least 70% identity to SEQ ID NO: 4. In some embodiments, the programmable nuclease comprises a sequence with at least 75% identity to SEQ ID NO: 4. In some embodiments, the programmable nuclease comprises a sequence with at least 80% identity to SEQ ID NO: 4. In some embodiments, the programmable nuclease comprises a sequence with at least 85% identity to SEQ ID NO: 4. In some embodiments, the programmable nuclease comprises a sequence with at least 90% identity to SEQ ID NO: 4. In some embodiments, the programmable nuclease comprises a sequence with at least 92% identity to SEQ ID NO: 4. In some embodiments, the programmable nuclease comprises a sequence with at least 95% identity to SEQ ID NO: 4. In some embodiments, the programmable nuclease comprises a sequence with at least 97% identity to SEQ ID NO: 4. In some embodiments, the programmable nuclease comprises a sequence with at least 98% identity to SEQ ID NO: 4. In some embodiments, the programmable nuclease comprises a sequence with at least 99% identity to SEQ ID NO: 4. In some embodiments, the programmable nuclease comprises a sequence of SEQ ID NO: 4.

[0152] In some embodiments, the programmable nuclease comprises a sequence with at least 70% identity to SEQ ID NO: 11. In some embodiments, the programmable nuclease comprises a sequence with at least 75% identity to SEQ ID NO: 11. In some embodiments, the programmable nuclease comprises a sequence with at least 80% identity to SEQ ID NO: 11. In some embodiments, the programmable nuclease comprises a sequence with at least 85% identity to SEQ ID NO: 11. In some embodiments, the programmable nuclease comprises a sequence with at least 90% identity to SEQ ID NO: 11. In some embodiments, the programmable nuclease comprises a sequence with at least 92% identity to SEQ ID NO: 11. In some embodiments, the programmable nuclease comprises a sequence with at least 95% identity to SEQ ID NO: 11. In some embodiments, the programmable nuclease comprises a sequence with at least 97% identity to SEQ ID NO: 11. In some embodiments, the programmable nuclease comprises a sequence with at least 98% identity to SEQ ID NO: 11. In some embodiments, the programmable nuclease comprises a sequence with at least 99% identity to SEQ ID NO: 11. In some embodiments, the programmable nuclease comprises a sequence of SEQ ID NO: 11.

[0153] In some embodiments, the programmable nuclease comprises a sequence with at least 70% identity to SEQ ID NO: 12. In some embodiments, the programmable nuclease comprises a sequence with at least 75% identity to SEQ ID NO: 12. In some embodiments, the programmable nuclease comprises a sequence with at least 80% identity to SEQ ID NO: 12. In some embodiments, the programmable nuclease comprises a sequence with at least 85% identity to SEQ ID NO: 12. In some embodiments, the programmable nuclease comprises a sequence with at least 90% identity to SEQ ID NO: 12. In some embodiments, the programmable nuclease comprises a sequence with at least 92% identity to SEQ ID NO: 12. In some embodiments, the programmable nuclease comprises a sequence with at least 95% identity to SEQ ID NO: 12. In some embodiments, the programmable nuclease comprises a sequence with at least 97% identity to SEQ ID NO: 12. In some embodiments, the programmable nuclease comprises a sequence with at least 98% identity to SEQ ID NO: 12. In some embodiments, the programmable nuclease comprises a sequence with at least 99% identity to SEQ ID NO: 12. In some embodiments, the programmable nuclease comprises a sequence of SEQ ID NO: 12.

[0154] In some embodiments, the programmable nuclease comprises a sequence with at least 70% identity to SEQ ID NO: 17. In some embodiments, the programmable nuclease comprises a sequence with at least 75% identity to SEQ ID NO: 17. In some embodiments, the programmable nuclease comprises a sequence with at least 80% identity to SEQ ID NO: 17. In some embodiments, the programmable nuclease comprises a sequence with at least 85% identity to SEQ ID NO: 17. In some embodiments, the programmable nuclease comprises a sequence with at least 90% identity to SEQ ID NO: 17. In some embodiments, the programmable nuclease comprises a sequence with at least 92% identity to SEQ ID NO: 17. In some embodiments, the programmable nuclease comprises a sequence with at least 95% identity to SEQ ID NO: 17. In some embodiments, the programmable nuclease comprises a sequence with at least 97% identity to SEQ ID NO: 17. In some embodiments, the programmable nuclease comprises a sequence with at least 98% identity to SEQ ID NO: 17. In some embodiments, the programmable nuclease comprises a sequence with at least 99% identity to SEQ ID NO: 17. In some embodiments, the programmable nuclease comprises a sequence of SEQ ID NO: 17.

[0155] In some embodiments, the programmable nuclease comprises a sequence with at least 70% identity to SEQ ID NO: 18. In some embodiments, the programmable nuclease comprises a sequence with at least 75% identity to SEQ ID NO: 18. In some embodiments, the programmable nuclease comprises a sequence with at least 80% identity to SEQ ID NO: 18. In some embodiments, the programmable nuclease comprises a sequence with at least 85% identity to SEQ ID NO: 18. In some embodiments, the programmable nuclease comprises a sequence with at least 90% identity to SEQ ID NO: 18. In some embodiments, the programmable nuclease comprises a sequence with at least 92% identity to SEQ ID NO: 18. In some embodiments, the programmable nuclease comprises a sequence with at least 95% identity to SEQ ID NO: 18. In some embodiments, the programmable nuclease comprises a sequence with at least 97% identity to SEQ ID NO: 18. In some embodiments, the programmable nuclease comprises a sequence with at least 98% identity to SEQ ID NO: 18. In some embodiments, the programmable nuclease comprises a sequence with at least 99% identity to SEQ ID NO: 18. In some embodiments, the programmable nuclease comprises a sequence of SEQ ID NO: 18.

[0156] In some embodiments, the programmable nuclease comprises a sequence with at least 70% identity to SEQ ID NO: 105. In some embodiments, the programmable nuclease comprises a sequence with at least 75% identity to SEQ ID NO: 105. In some embodiments, the programmable nuclease comprises a sequence with at least 80% identity to SEQ ID NO: 105. In some embodiments, the programmable nuclease comprises a sequence with at least 85% identity to SEQ ID NO: 105. In some embodiments, the programmable nuclease comprises a sequence with at least 90% identity to SEQ ID NO: 105. In some embodiments, the programmable nuclease comprises a sequence with at least 92% identity to SEQ ID NO: 105. In some embodiments, the programmable nuclease comprises a sequence with at least 95% identity to SEQ ID NO: 105. In some embodiments, the programmable nuclease comprises a sequence with at least 97% identity to SEQ ID NO: 105. In some embodiments, the programmable nuclease comprises a sequence with at least 98% identity to SEQ ID NO: 105. In some embodiments, the programmable nuclease comprises a sequence with at least 99% identity to SEQ ID NO: 105. In some embodiments, the programmable nuclease comprises a sequence of SEQ ID NO: 105.

[0157] In some embodiments, the programmable nuclease comprises a sequence with at least 70% identity to the N-terminal 717 amino acid residues of SEQ ID NO: 105. In some embodiments, the programmable nuclease comprises a sequence with at least 75% identity to the N-terminal 717 amino acid residues of SEQ ID NO: 105. In some embodiments, the programmable nuclease comprises a sequence with at least 80% identity to the N-terminal 717 amino acid residues of SEQ ID NO: 105. In some embodiments, the programmable nuclease comprises a sequence with at least 85% identity to the N-terminal 717 amino acid residues of SEQ ID NO: 105. In some embodiments, the programmable nuclease comprises a sequence with at least 90% identity to SEQ ID NO: 105. In some embodiments, the programmable nuclease comprises a sequence with at least 95% identity to the N-terminal 717 amino acid residues of SEQ ID NO: 105. In some embodiments, the programmable nuclease comprises a sequence with at least 98% identity to the N-terminal 717 amino acid residues of SEQ ID NO: 105. In some embodiments, the programmable nuclease comprises a sequence with at least 99% identity to the N-terminal 717 amino acid residues of SEQ ID NO: 105. In some embodiments, the programmable nuclease comprises a sequence of the N-terminal 717 amino acid residues of SEQ ID NO: 105.

[0158] In some embodiments, the programmable nuclease comprises a sequence with at least 70% identity to SEQ ID NO: 106. In some embodiments, the programmable nuclease comprises a sequence with 75% identity to SEQ ID NO: 106. In some embodiments, the programmable nuclease comprises a sequence with at least 80% identity to SEQ ID NO: 106. In some embodiments, the programmable nuclease comprises a sequence with at least 85% identity to SEQ ID NO: 106. In some embodiments, the programmable nuclease comprises a sequence with at least 90% identity to SEQ ID NO: 105. In some embodiments, the programmable nuclease comprises a sequence with at least 95% identity to SEQ ID NO: 106. In some embodiments, the programmable nuclease comprises a sequence with at least 98% identity to SEQ ID NO: 106. In some embodiments, the programmable nuclease comprises a sequence with at least 99% identity to SEQ ID NO: 106. In some embodiments, the programmable nuclease comprises a sequence of SEQ ID NO: 106.

[0159] In some embodiments, the programmable nuclease comprises a sequence with at least 70% identity to SEQ ID NO: 107. In some embodiments, the programmable nuclease comprises a sequence with at least 75% identity to SEQ ID NO: 107. In some embodiments, the programmable nuclease comprises a sequence with at least 80% identity to SEQ ID NO: 107. In some embodiments, the programmable nuclease comprises a sequence with at least 85% identity to SEQ ID NO: 107. In some embodiments, the programmable nuclease comprises a sequence with at least 90% identity to SEQ ID NO: 107. In some embodiments, the programmable nuclease comprises a sequence with at least 95% identity to SEQ ID NO: 107. In some embodiments, the programmable nuclease comprises a sequence with at least 98% identity to SEQ ID NO: 107. In some embodiments, the programmable nuclease comprises a sequence with at least 99% identity to SEQ ID NO: 107. In some embodiments, the programmable nuclease comprises a sequence of SEQ ID NO: 107.

[0160] The programmable nucleases disclosed herein can be codon optimized for expression in a specific cell, for example, a bacterial cell, a plant cell, a eukaryotic cell, an animal cell, a mammalian cell, or a human cell. In some embodiments, the programmable nuclease is codon optimized for a human cell.

[0161] The programmable nucleases presented in TABLE 1 or variants or fragments thereof comprising at least 70%, at least 75%, at least 80%, at least 85%, at least 90%, at least 92%, at least 95%, at least 97%, at least 99%, or 100% sequence identity with any one of SEQ ID NO: 1-SEQ ID NO: 47, SEQ ID NO. 105, and SEQ ID NO: 107 can comprise nicking activity. Compositions and methods of the disclosure can comprise a programmable nickase comprising at least 70%, at least 75%, at least 80%, at least 85%, at least 90%, at least 92%, at least 95%, at least 97%, at least 99%, or 100% sequence identity to any one of SEQ ID NO: 1-SEQ ID NO: 47, SEQ ID NO. 105, and SEQ ID NO: 107. Compositions and methods of the disclosure can comprise a programmable nickase comprising at least 70%, at least 75%, at least 80%, at least 85%, at least 90%, at least 92%, at least 95%, at least 97%, at least 99%, or 100% sequence identity to SEQ ID NO: 2. Compositions and methods of the disclosure can comprise a programmable nickase comprising at least 70%, at least 75%, at least 80%, at least 85%, at least 90%, at least 92%, at least 95%, at least 97%, at least 99%, or 100% sequence identity to SEQ ID NO: 4. Compositions and methods of the disclosure can comprise a programmable nickase comprising at least 70%, at least 75%, at least 80%, at least 85%, at least 90%, at least 92%, at least 95%, at least 97%, at least 99%, or 100% sequence identity to SEQ ID NO: 11. Compositions and methods of the disclosure can comprise a programmable nickase comprising at least 70%, at least 75%, at least 80%, at least 85%, at least 90%, at least 92%, at least 95%, at least 97%, at least 99%, or 100% sequence identity to SEQ ID NO: 17. Compositions and methods of the disclosure can comprise a programmable nuclease comprising at least 70%, at least 75%, at least 80%, at least 85%, at least 90%, at least 92%, at least 95%, at least 97%, at least 99%, or 100% sequence identity to SEQ ID NO: 18.

[0162] The programmable nucleases presented in TABLE 1 or variants thereof comprising at least 70%, at least 75%, at least 80%, at least 85%, at least 90%, at least 92%, at least 95%, at least 97%, at least 99%, or 100% sequence identity with any one of SEQ ID NO: 1-SEQ ID NO: 47, SEQ ID NO. 105, and SEQ ID NO: 107 can comprise double-strand DNA cleavage activity. Compositions and methods of the disclosure can comprise a programmable nuclease capable of introducing a double-strand break in a target DNA sequence and comprising at least 70%, at least 75%, at least 80%, at least 85%, at least 90%, at least 92%, at least 95%, at least 97%, at least 99%, or 100% sequence identity to any one of SEQ ID NO: 1-SEQ ID NO: 47, SEQ ID NO. 105, and SEQ ID NO: 107. Compositions and methods of the disclosure can comprise a programmable nuclease with double-strand DNA cleaving activity and comprising at least 70%, at least 75%, at least 80%, at least 85%, at least 90%, at least 92%, at least 95%, at least 97%, at least 99%, or 100% sequence identity to SEQ ID NO: 12. Compositions and methods of the disclosure can comprise a programmable nuclease with double-strand DNA cleaving activity and comprising at least 70%, at least 75%, at least 80%, at least 85%, at least 90%, at least 92%, at least 95%, at least 97%, at least 99%, or 100% sequence identity to SEQ ID NO: 2. Compositions and methods of the disclosure can comprise a programmable nickase comprising at least 70%, at least 75%, at least 80%, at least 85%, at least 90%, at least 92%, at least 95%, at least 97%, at least 99%, or 100% sequence identity to SEQ ID NO: 4. Compositions and methods of the disclosure can comprise a programmable nuclease with double-strand DNA cleaving activity and comprising at least 70%, at least 75%, at least 80%, at least 85%, at least 90%, at least 92%, at least 95%, at least 97%, at least 99%, or 100% sequence identity to SEQ ID NO: 11.

[0163] The programmable nucleases presented in TABLE 1 or variants thereof comprising at least 70%, at least 75%, at least 80%, at least 85%, at least 90%, at least 92%, at least 95%, at least 97%, at least 99%, or 100% sequence identity with any one of SEQ ID NO: 1-SEQ ID NO: 47 and SEQ ID NO. 105 can comprise nickase activity and double-strand DNA cleavage activity. The ratio of the nickase activity and double-strand DNA cleavage activity can be modulated depending on the reaction conditions including for example, RNP complexing temperature, the crRNA repeat sequence in the guide nucleic acid. In some embodiments, nickase activity is reduced when RNP complexing temperature is room temperature, for example 20 to 22° C., compared to when RNP complexing temperature is 37° C. In some embodiments, the double-strand DNA cleavage activity is insensitive to RNP complexing at 37° C. compared to room temperature, or the double-strand DNA cleavage activity is reduced by 10%, 20% or 30% when complexed with a guide RNA at room temperature as compared to when complexed at 37° C. In a preferred embodiment, double-strand cleavage activity is similar when the RNP complexing temperature is room temperature and 37° C.

[0164] The programmable nucleases presented in TABLE 1 or variants thereof comprising at least 70%, at least 75%, at least 80%, at least 85%, at least 90%, at least 92%, at least 95%, at least 97%, at least 99%, or 100% sequence identity with any one of SEQ ID NO: 1-SEQ ID NO: 47, SEQ ID NO. 105, and SEQ ID NO: 107 can comprise reduced or substantially no nucleic acid cleavage activity.

[0165] In some embodiments, the N-terminal amino acid sequence of the programmable nuclease is not MISKMIKPTV (SEQ ID NO: 113). In some embodiments, the programmable nuclease does not include the amino acid sequence MISKMIKPTV (SEQ ID NO: 114).

[0166] In some embodiments, the N-terminal amino acid sequence of the programmable nuclease is not MISK (SEQ ID NO: 115). In some embodiments, the programmable nuclease does not include the amino acid sequence MISK (SEQ ID NO: 115).

[0167] In some embodiments, a composition comprises a first programmable nuclease described herein and a second programmable nuclease described herein. In some embodiments, a complex comprises a first programmable nuclease described herein and a second programmable nuclease described herein. In preferred embodiments, a complex comprises a first programmable nuclease described herein and a second programmable nuclease described herein, wherein the first and second programmable nucleases are the same programmable nuclease. In some embodiments, the first and second programmable nucleases form a dimer. In some preferred embodiments, the first and second programmable nucleases form a homodimer.

[0168] In some embodiments, a dimer comprises a first programmable nuclease described herein and a second programmable nuclease described herein. In preferred embodiments, the dimer is a homodimer wherein the first and second programmable nucleases are the same.

[0169] In some embodiments, a programmable nuclease may be a programmable nickase. The present disclosure provides compositions of programmable nickases, capable of introducing a break in a single strand of a double stranded DNA (dsDNA) (“nicking”). In some embodiments the programmable nickase is a programmable DNA nickase. Said programmable nickases can be coupled to a guide nucleic acid that targets a particular region of interest in the dsDNA. In some embodiments, two programmable nickases are combined and delivered together to generate two strand breaks. For example, a first programmable nickase can be targeted to and nicks a first region of dsDNA and a second programmable nickase can be targeted to and nicks a second region of the same dsDNA on the opposing strand. When combined and delivered together to generate nicks on opposing strands of the dsDNA, two strand breaks in the dsDNA can be generated. The strand breaks can be repaired and rejoined by non-homologous end joining (NHEJ) or homology directed repair (HDR). Thus, two programmable nickases disclosed herein can be combined to selectively edit nucleic acid sequences. This can be useful in any genome editing method, for example, used for therapeutic applications to treat a disease or disorder, or for agricultural applications.

[0170] In some embodiments, a programmable nuclease as disclosed herein can be used for genome editing purposes to generate strand breaks in order to excise a region of DNA or to subsequently introduce a region of DNA (e.g., donor DNA).

[0171] In some embodiments, the programmable nucleases (e.g., nickases) disclosed herein can be used in DNA Endonuclease Targeted CRISPR TransReporter (DETECTR) assays. In some embodiments, the programmable nuclease is a programmable nickase. A DETECTR assay can utilize the trans-cleavage abilities of some programmable nucleases to achieve fast and high-fidelity detection of a target nucleic acid in a sample. The target nucleic acid can be DNA or RNA. For example, following target DNA extraction from a biological sample, crRNA comprising a portion that is complementary to the target DNA of interest can bind to the target DNA sequence, initiating indiscriminate ssDNase activity by the programmable nuclease. In some embodiments, the extracted DNA is amplified by PCR or isothermal amplification reactions before contacting the DNA to the programmable nuclease complexed with a guide RNA. Upon hybridization with the target DNA, the trans-cleavage activity of the programmable nuclease is activated, which can then cleave an ssDNA fluorescence-quenching (FQ) reporter molecule. Cleavage of the reporter molecule can provide a fluorescent readout indicating the presence of the target DNA in the sample. In some embodiments, the programmable nucleases disclosed herein can be combined, or multiplexed, with other programmable nucleases in a DETECTR assay. The principles of the DETECTR assay are described in Chen et al. (Science 2018 April 27; 360(6387):436-439) and can be modified to facilitate the use of the programmable nucleases described herein. In some embodiments, the programmable nucleases disclosed herein can be used in a specific high-sensitivity enzymatic reporter unlocking (SHERLOCK) assay. The principles of the SHERLOCK assay are described in Kellner et al. (Nat Protoc. 2019 October; 14(10):2986-3012) and can be modified to facilitate the use of the programmable nucleases described herein. Thus some embodiments provide a method of detecting a target nucleic acid in a sample, the method comprising: contacting a sample comprising a target nucleic acid with (a) a programmable CasΦ nuclease disclosed herein, (b) a guide RNA comprising a region that binds to the programmable CasΦ nuclease and an additional region that binds to the target nucleic acid, and (c) a detector nucleic acid that does not bind the guide RNA; cleaving the detector nucleic acid by the programmable CasΦ nuclease; and detecting the target nucleic acid by measuring a signal produced by the cleavage of the detector nucleic acid. In preferred embodiments, the detector nucleic acid is a single stranded DNA reporter.

[0172] The programmable nucleases of the present disclosure can show enhanced activity, as measured by enhanced cleavage of an ssDNA-FQ reporter, under certain conditions in the presence of the target DNA. For example, the programmable nucleases of the present disclosure can have variable levels of activity based on a buffer formulation, a pH level, temperature, or salt. Buffers consistent with the present disclosure include phosphate buffers, Tris buffers, and HEPES buffers. Programmable nucleases of the present disclosure can show optimal activity in phosphate buffers, Tris buffers, and HEPES buffers.

[0173] Programmable nucleases can also exhibit varying levels of nickase or double-stranded cleavage activity at different pH levels. For example, enhanced cleavage can be observed between pH 7 and pH 9. In some embodiments, programmable nuclease of the present disclosure exhibit enhanced cleavage at about pH 7, about pH 7.1, about pH 7.2, about pH 7.3, about pH 7.4, about pH 7.5, about pH 7.6, about pH 7.7, about pH 7.8, about pH 7.9, about pH 8, about pH 8.1, about pH 8.2, about pH 8.3, about pH 8.4, about pH 8.5, about pH 8.6, about pH 8.7, about pH 8.8, about pH 8.9, about pH 9, from pH 7 to 7.5, from pH 7.5 to 8, from pH 8 to 8.5, from pH 8.5 to 9, or from pH 7 to 8.5.

[0174] In some embodiments, the programmable nucleases of the present disclosure exhibit enhanced cleavage of ssDNA-FQ reporters DNA at a temperature of 25° C. to 50° C. in the presence of target DNA. For example, the programmable nucleases of the present disclosure can exhibit enhanced cleavage of an ssDNA-FQ reporter at about 25° C., about 26° C., about 27° C., about 28° C., about 29° C., about 30° C., about 31° C., about 32° C., about 33° C., about 34° C., about 35° C., about 36° C., about 37° C., about 38° C., about 39° C., about 40° C., about 41° C., about 42° C., about 43° C., about 44° C., about 45° C., about 46° C., about 47° C., about 48° C., about 49° C., about 50° C., from 30° C. to 40° C., from 35° C. to 45° C., or from 35° C. to 40° C.

[0175] The programmable nucleases of the present disclosure may not be sensitive to salt concentrations in a sample in the presence of the target DNA. Advantageously, said programmable nucleases can be active and capable of cleaving ssDNA-FQ-reporter sequences under varying salt concentrations from 25 nM salt to 200 mM salt. Various salts are consistent with this property of the programmable nucleases disclosed herein, including NaCl or KCl. The programmable nucleases of the present disclosure can be active at salt concentrations of from 25 nM to 500 nM salt, from 500 nM to 1000 nM salt, from 1000 nM to 2000 nM salt, from 2000 nM to 3000 nM salt, from 3000 nM to 4000 nM salt, from 4000 nM to 5000 nM salt, from 5000 nM to 6000 nM salt, from 6000 nM to 7000 nM salt, from 7000 nM to 8000 nM salt, from 8000 nM to 9000 nM salt, from 9000 nM to 0.01 mM salt, from 0.01 mM to 0.05 mM salt, from 0.05 mM to 0.1 mM salt, from 0.1 mM to 10 mM salt, from 10 mM to 100 mM salt, or from 100 mM to 500 mM salt. Thus, the programmable nucleases of the present disclosure can exhibit cleavage activity independent of the salt concentration in a sample.

[0176] Programmable nucleases of the present disclosure can be capable of cleaving any ssDNA-FQ reporter, regardless of its sequence. The programmable nucleases provided herein can, thus, be capable of cleaving a universal ssDNA FQ reporter. In some embodiments, the programmable nucleases provided herein cleave homopolymer ssDNA-FQ reporter comprising 5 to 20 adenines, 5 to 20 thymines, 5 to 20 cytosines, or 5 to 20 guanines. Programmable nucleases of the present disclosure, thus, are capable of cleaving ssDNA-FQ reporters also cleaved by programmable nucleases, as disclosed elsewhere herein, allowing for facile multiplexing of multiple programmable nickases and programmable nucleases in a single assay having a single ssDNA-FQ reporter.

[0177] Programmable nucleases of the present disclosure can bind a wild type protospacer adjacent motif (PAM) or a mutant PAM in a target DNA. In some embodiments the programmable CasΦ nucleases of the present disclosure recognizes and bind a protospacer adjacent motif (PAM) of 5′-TBN-3′, where B is one or more of C, G, or, T. For example, programmable CasΦ nucleases of the present disclosure may recognizes and bind a protospacer adjacent motif (PAM) of 5′-TTTN-3′. As another example, programmable CasΦ nucleases of the present disclosure may recognizes and bind a protospacer adjacent motif (PAM) of 5′-TTN-3.′ In some embodiments, the PAM is 5′-TTTA-3′, 5′-GTTK-3′, 5′-VTTK-3′, 5′-VTTS-3′, 5′-TTTS-3′ or 5′-VTTN-3′, where K is G or T, V is A, C or G, and S is C or G. In some embodiments, the PAM is 5′-GTTB-3′, wherein B is C, G, or, T.

[0178] In some embodiments of the present disclosure, the programmable CasΦ nucleases recognize and bind a PAM of 5′-NTTN-3′.

[0179] In some embodiments, when the programmable CasΦ nuclease or a variant thereof comprises at least 70%, at least 75%, at least 80%, at least 85%, at least 90%, at least 92%, at least 95%, at least 97%, at least 99%, or 100% sequence identity with SEQ ID NO: 2, the programmable CasΦ nuclease or a variant recognizes a 5′-GTTK-3′ PAM. In some embodiments, when the programmable CasΦ nuclease or a variant thereof comprises at least 70%, at least 75%, at least 80%, at least 85%, at least 90%, at least 92%, at least 95%, at least 97%, at least 99%, or 100% sequence identity with SEQ ID NO: 2, the programmable CasΦ nuclease or a variant recognizes a 5′-NTTN-3′ PAM.

[0180] In some embodiments, when the programmable CasΦ nuclease or a variant thereof comprises at least 70%, at least 75%, at least 80%, at least 85%, at least 90%, at least 92%, at least 95%, at least 97%, at least 99%, or 100% sequence identity with SEQ ID NO: 4, the programmable CasΦ nuclease or a variant recognizes a 5′-VTTK-3′ PAM. In some embodiments, when the programmable CasΦ nuclease or a variant thereof comprises at least 70%, at least 75%, at least 80%, at least 85%, at least 90%, at least 92%, at least 95%, at least 97%, at least 99%, or 100% sequence identity with SEQ ID NO: 4, the programmable CasΦ nuclease or a variant recognizes a 5′-NTTN-3′ PAM.

[0181] In some embodiments, when the programmable CasΦ nuclease or a variant thereof comprises at least 70%, at least 75%, at least 80%, at least 85%, at least 90%, at least 92%, at least 95%, at least 97%, at least 99%, or 100% sequence identity with SEQ ID NO: 11, the programmable CasΦ nuclease or a variant recognizes a 5′-VTTS-3′ PAM. In some embodiments, when the programmable CasΦ nuclease or a variant thereof comprises at least 70%, at least 75%, at least 80%, at least 85%, at least 90%, at least 92%, at least 95%, at least 97%, at least 99%, or 100% sequence identity with SEQ ID NO: 11, the programmable CasΦ nuclease or a variant recognizes a 5′-NTTN-3′ PAM.

[0182] In some embodiments, when the programmable CasΦ nuclease or a variant thereof comprises at least 70%, at least 75%, at least 80%, at least 85%, at least 90%, at least 92%, at least 95%, at least 97%, at least 99%, or 100% sequence identity with SEQ ID NO: 12, the programmable CasΦ nuclease or a variant recognizes a 5′-TTTS-3′ PAM. In some embodiments, when the programmable CasΦ nuclease or a variant thereof comprises at least 70%, at least 75%, at least 80%, at least 85%, at least 90%, at least 92%, at least 95%, at least 97%, at least 99%, or 100% sequence identity with SEQ ID NO: 12, the programmable CasΦ nuclease or a variant recognizes a 5′-NTTN-3′ PAM.

[0183] In some embodiments, when the programmable CasΦ nuclease or a variant thereof comprises at least 70%, at least 75%, at least 80%, at least 85%, at least 90%, at least 92%, at least 95%, at least 97%, at least 99%, or 100% sequence identity with SEQ ID NO: 18, the programmable CasΦ nuclease or a variant recognizes a 5′-VTTN-3′ PAM.

[0184] In some embodiments, when the programmable CasΦ nuclease or a variant thereof comprises at least 70%, at least 75%, at least 80%, at least 85%, at least 90%, at least 92%, at least 95%, at least 97%, at least 99%, or 100% sequence identity with SEQ ID NO: 20, the programmable CasΦ nuclease or a variant recognizes a 5′-NTNN-3′ PAM.

[0185] In some embodiments, when the programmable CasΦ nuclease or a variant thereof comprises at least 70%, at least 75%, at least 80%, at least 85%, at least 90%, at least 92%, at least 95%, at least 97%, at least 99%, or 100% sequence identity with SEQ ID NO: 20, the programmable CasΦ nuclease or a variant recognizes a 5′-TTN-3′ PAM.

[0186] In some embodiments, when the programmable CasΦ nuclease or a variant thereof comprises at least 70%, at least 75%, at least 80%, at least 85%, at least 90%, at least 92%, at least 95%, at least 97%, at least 99%, or 100% sequence identity with SEQ ID NO: 26, the programmable CasΦ nuclease or a variant recognizes a 5′-NTTG-3′ PAM.

[0187] In some embodiments, when the programmable CasΦ nuclease or a variant thereof comprises at least 70%, at least 75%, at least 80%, at least 85%, at least 90%, at least 92%, at least 95%, at least 97%, at least 99%, or 100% sequence identity with SEQ ID NO: 32, the programmable CasΦ nuclease or a variant recognizes a 5′-GTTB-3′ PAM, wherein B is C, G, or N.

[0188] In some embodiments, when the programmable CasΦ nuclease or a variant thereof comprises at least 70%, at least 75%, at least 80%, at least 85%, at least 90%, at least 92%, at least 95%, at least 97%, at least 99%, or 100% sequence identity with SEQ ID NO: 42, the programmable CasΦ nuclease or a variant recognizes a 5′-GTTN-3′ PAM.

[0189] In some embodiments, when the programmable CasΦ nuclease or a variant thereof comprises at least 70%, at least 75%, at least 80%, at least 85%, at least 90%, at least 92%, at least 95%, at least 97%, at least 99%, or 100% sequence identity with SEQ ID NO: 41, the programmable CasΦ nuclease or a variant recognizes a 5′-NTTN-3′ PAM.

[0190] In some embodiments, when the programmable CasΦ nuclease or a variant thereof comprises at least 70%, at least 75%, at least 80%, at least 85%, at least 90%, at least 92%, at least 95%, at least 97%, at least 99%, or 100% sequence identity with SEQ ID NO: 24, the programmable CasΦ nuclease or a variant recognizes a 5′-NTNN-3′ PAM.

[0191] In some embodiments, when the programmable CasΦ nuclease or a variant thereof comprises at least 70%, at least 75%, at least 80%, at least 85%, at least 90%, at least 92%, at least 95%, at least 97%, at least 99%, or 100% sequence identity with SEQ ID NO: 25, the programmable CasΦ nuclease or a variant recognizes a 5′-NTNN-3′ PAM.

[0192] The programmable nucleases and other reagents (e.g., a guide nucleic acid) can be formulated in a buffer disclosed herein. A wide variety of buffered solutions are compatible with the methods, compositions, reagents, enzymes, and kits disclosed herein. Buffers are compatible with different programmable nucleases described herein. Any of the methods, compositions, reagents, enzymes, or kits disclosed herein may comprise a buffer. These buffers may be compatible with the other reagents, samples, and support mediums as described herein for detection of an ailment, such as a disease, cancer, or genetic disorder, or genetic information, such as for phenotyping, genotyping, or determining ancestry. A buffer, as described herein, can enhance the cis- or trans-cleavage rates of any of the programmable nucleases described herein. The buffer can increase the discrimination of the programmable nucleases for the target nucleic acid. The methods as described herein can be performed in the buffer.

[0193] In some embodiments, a buffer may comprise one or more of a buffering agent, a salt, a crowding agent, or a detergent, or any combination thereof. A buffer may comprise a reducing agent. A buffer may comprise a competitor. Exemplary buffering agents include HEPES, TRIS, MES, ADA, PIPES, ACES, MOPSO, BIS-TRIS propane, BES, MOPS, TES, DISO, Trizma, TRICINE, GLY-GLY, HEPPS, BICINE, TAPS, A MPD, A MPSO, CHES, CAPSO, AMP, CAPS, phosphate, citrate, acetate, imidazole, or any combination thereof. A buffering agent may be compatible with a programmable nuclease. A buffer compatible with a programmable nuclease may comprise a buffering agent at a concentration of from 1 mM to 200 mM. A buffer compatible with a programmable nuclease may comprise a buffering agent at a concentration of from 10 mM to 30 mM. A buffer compatible with a programmable nuclease may comprise a buffering agent at a concentration of about 20 mM. A composition (e.g., a composition comprising a programmable nuclease) may have a pH of from 2.5 to 3.5. A composition (e.g., a composition comprising a programmable nuclease) may have a pH of from 3 to 4. A composition (e.g., a composition comprising a programmable nuclease) may have a pH of from 3.5 to 4.5. A composition (e.g., a composition comprising a programmable nuclease) may have a pH of from 4 to 5. A composition (e.g., a composition comprising a programmable nuclease) may have a pH of from 4.5 to 5.5. A composition (e.g., a composition comprising a programmable nuclease) may have a pH of from 5 to 6. A composition (e.g., a composition comprising a programmable nuclease) may have a pH of from 5.5 to 6.5. A composition (e.g., a composition comprising a programmable nuclease) may have a pH of from 6 to 7. A composition (e.g., a composition comprising a programmable nuclease) may have a pH of from 6.5 to 7.5. A composition (e.g., a composition comprising a programmable nuclease) may have a pH of from 7 to 8. A composition (e.g., a composition comprising a programmable nuclease) may have a pH of from 7.5 to 8.5. A composition (e.g., a composition comprising a programmable nuclease) may have a pH of from 8 to 9. A composition (e.g., a composition comprising a programmable nuclease) may have a pH of from 8.5 to 9.5. A composition (e.g., a composition comprising a programmable nuclease) may have a pH of from 9 to 10. A composition (e.g., a composition comprising a programmable nuclease) may have a pH of from 9.5 to 10.5.

[0194] A buffer may comprise a salt. Exemplary salts include NaCl, KCl, magnesium acetate, potassium acetate, CaCl₂) and MgCl₂. A buffer may comprise potassium acetate, magnesium acetate, sodium chloride, magnesium chloride, or any combination thereof. A buffer compatible with a programmable nuclease may comprise a salt at a concentration of from 5 mM to 100 mM. A buffer compatible with a programmable nuclease may comprise a salt at a concentration of from 5 mM to 10 mM. In some embodiments, a buffer compatible with a programmable nuclease comprises a salt from 1 mM to 60 mM. In some embodiments, a buffer compatible with a programmable nuclease comprises a salt from 1 mM to 10 mM. In some embodiments, a buffer compatible with a programmable nuclease comprises a salt at about 105 mM. In some embodiments, a buffer compatible with a programmable nuclease comprises a salt at about 55 mM. In some embodiments, a buffer compatible with a programmable nuclease comprises a salt at about 7 mM. In some embodiments, a buffer compatible with a programmable nuclease comprises a salt, wherein the salt comprises potassium acetate and magnesium acetate. In some embodiments, a buffer compatible with a programmable nuclease comprises a salt, wherein the salt comprises sodium chloride and magnesium chloride. In some embodiments, a buffer compatible with a programmable nuclease comprises a salt, wherein the salt comprises potassium chloride and magnesium chloride.

[0195] A buffer may comprise a crowding agent. Exemplary crowding agents include glycerol and bovine serum albumin. A buffer may comprise glycerol. A crowding agent may reduce the volume of solvent available for other molecules in the solution, thereby increasing the effective concentrations of said molecules. A buffer compatible with a programmable nuclease may comprise a crowding agent at a concentration of from 0.01% (v/v) to 10% (v/v). A buffer compatible with a programmable nuclease may comprise a crowding agent at a concentration of from 0.5% (v/v) to 10% (v/v).

[0196] A buffer may comprise a detergent. Exemplary detergents include Tween, Triton-X, and IGEPAL. A buffer may comprise Tween, Triton-X, or any combination thereof. A buffer compatible with a programmable nuclease may comprise Triton-X. A buffer compatible with a programmable nuclease may comprise IGEPAL CA-630. In some embodiments, a buffer compatible with a programmable nuclease comprises a detergent at a concentration of 2% (v/v) or less. A buffer compatible with a programmable nuclease may comprise a detergent at a concentration of 2% (v/v) or less. A buffer compatible with a programmable nuclease may comprise a detergent at a concentration of from 0.00001% (v/v) to 0.01% (v/v). A buffer compatible with a programmable nuclease may comprise a detergent at a concentration of about 0.01% (v/v).

[0197] A buffer may comprise a reducing agent. Exemplary reducing agents comprise dithiothreitol (DTT), 8-mercaptoethanol (BME), or tris(2-carboxyethyl)phosphine (TCEP). A buffer compatible with a programmable nuclease may comprise DTT. A buffer compatible with a programmable nuclease may comprise a reducing agent at a concentration of from 0.01 mM to 100 mM. A buffer compatible with a programmable nuclease may comprise a reducing agent at a concentration of from 0.1 mM to 10 mM. A buffer compatible with a programmable nuclease may comprise a reducing agent at a concentration of from 0.5 mM to 2 mM. A buffer compatible with a programmable nuclease may comprise a reducing agent at a concentration of from 0.01 mM to 100 mM. A buffer compatible with a programmable nuclease may comprise a reducing agent at a concentration of from 0.1 mM to 10 mM. A buffer compatible with a programmable nuclease may comprise a reducing agent at a concentration of about 1 mM.

[0198] A buffer compatible with a programmable nuclease may comprise a competitor. Exemplary competitors compete with the target nucleic acid or the reporter nucleic acid for cleavage by the programmable nuclease. Exemplary competitors include heparin, and imidazole, and salmon sperm DNA. A buffer compatible with a programmable nuclease may comprise a competitor at a concentration of from 1 μg/mL to 100 μg/mL. A buffer compatible with a programmable nuclease may comprise a competitor at a concentration of from 40 μg/mL to 60 μg/mL.

[0199] In some embodiments, a programmable CasΦ nuclease is described as a “nickase” if the predominant cleavage product is a nicked nucleic acid when the target nucleic acid is a double-stranded nucleic acid. In some embodiments, a programmable CasΦ nuclease cleaves both strands of a double-stranded target nucleic acid. In some embodiments, the target nucleic acid is DNA. In some embodiments, the target nucleic acid is double-stranded DNA.

[0200] Where a programmable CasΦ nuclease disclosed herein cleaves both strands of a double-stranded target nucleic acid, the strand break may be a staggered cut with a 5′ overhang. In some embodiments, the 5′ overhang is an overhang of between 5 and 10 nucleotides. In some embodiments, the 5′ overhang is an overhang of 5 or 6 nucleotides. In some embodiments, the 5′ overhang is an overhang of 9 or 10 nucleotides.

[0201] In some embodiments, where the programmable CasΦ nuclease or a variant thereof comprises at least 70%, at least 75%, at least 80%, at least 85%, at least 90%, at least 92%, at least 95%, at least 97%, at least 99%, or 100% sequence identity with SEQ ID NO: 20, the 5′ overhang is a 9 or 10 nucleotide overhang. In preferred embodiments, where the programmable CasΦ nuclease or a variant thereof comprises at least 90% sequence identity with SEQ ID NO: 20, the 5′ overhang is a 9 or 10 nucleotide overhang. In further preferred embodiments, where the programmable CasΦ nuclease or a variant thereof comprises the amino acid sequence of SEQ ID NO: 20, the 5′ overhang is a 9 or 10 nucleotide overhang.

[0202] In some embodiments, where the programmable CasΦ nuclease or a variant thereof comprises at least 70%, at least 75%, at least 80%, at least 85%, at least 90%, at least 92%, at least 95%, at least 97%, at least 99%, or 100% sequence identity with SEQ ID NO: 22, the 5′ overhang is a 9 or 10 nucleotide overhang. In preferred embodiments, where the programmable CasΦ nuclease or a variant thereof comprises at least 90% sequence identity with SEQ ID NO: 22, the 5′ overhang is a 10 nucleotide overhang. In further preferred embodiments, where the programmable CasΦ nuclease or a variant thereof comprises the amino acid sequence of SEQ ID NO: 22, the 5′ overhang is a 10 nucleotide overhang.

[0203] In some embodiments, where the programmable CasΦ nuclease or a variant thereof comprises at least 70%, at least 75%, at least 80%, at least 85%, at least 90%, at least 92%, at least 95%, at least 97%, at least 99%, or 100% sequence identity with SEQ ID NO: 28, the 5′ overhang is a 9 nucleotide overhang. In preferred embodiments, where the programmable CasΦ nuclease or a variant thereof comprises at least 90% sequence identity with SEQ ID NO: 28, the 5′ overhang is a 9 nucleotide overhang. In further preferred embodiments, where the programmable CasΦ nuclease or a variant thereof comprises the amino acid sequence of SEQ ID NO: 28, the 5′ overhang is a 9 nucleotide overhang.

[0204] In some embodiments, where the programmable CasΦ nuclease or a variant thereof comprises at least 70%, at least 75%, at least 80%, at least 85%, at least 90%, at least 92%, at least 95%, at least 97%, at least 99%, or 100% sequence identity with SEQ ID NO: 40, the 5′ overhang is a 10 nucleotide overhang. In preferred embodiments, where the programmable CasΦ nuclease or a variant thereof comprises at least 90% sequence identity with SEQ ID NO: 40, the 5′ overhang is a 10 nucleotide overhang. In further embodiments, where the programmable CasΦ nuclease or a variant thereof comprises the amino acid sequence of SEQ ID NO: 40, the 5′ overhang is a 10 nucleotide overhang.

[0205] In some embodiments, where the programmable CasΦ nuclease or a variant thereof comprises at least 70%, at least 75%, at least 80%, at least 85%, at least 90%, at least 92%, at least 95%, at least 97%, at least 99%, or 100% sequence identity with SEQ ID NO: 37, the 5′ overhang is a 9 or 10 nucleotide overhang. In preferred embodiments, where the programmable CasΦ nuclease or a variant thereof comprises at least 90% sequence identity with SEQ ID NO: 37, the 5′ overhang is a 9 or 10 nucleotide overhang. In further preferred embodiments, where the programmable CasΦ nuclease or a variant thereof comprises the amino acid sequence of SEQ ID NO: 37, the 5′ overhang is a 9 or 10 nucleotide overhang.

[0206] In some embodiments, where the programmable CasΦ nuclease or a variant thereof comprises at least 70%, at least 75%, at least 80%, at least 85%, at least 90%, at least 92%, at least 95%, at least 97%, at least 99%, or 100% sequence identity with SEQ ID NO: 41, the 5′ overhang is a 9 or 10 nucleotide overhang. In preferred embodiments, where the programmable CasΦ nuclease or a variant thereof comprises at least 90% sequence identity with SEQ ID NO: 41, the 5′ overhang is a 9 or 10 nucleotide overhang. In further preferred embodiments, where the programmable CasΦ nuclease or a variant thereof comprises the amino acid sequence of SEQ ID NO: 41, the 5′ overhang is a 9 or 10 nucleotide overhang.

[0207] In some embodiments, where the programmable CasΦ nuclease or a variant thereof comprises at least 70%, at least 75%, at least 80%, at least 85%, at least 90%, at least 92%, at least 95%, at least 97%, at least 99%, or 100% sequence identity with SEQ ID NO: 12, the 5′ overhang is a 5 nucleotide overhang. In preferred embodiments, where the programmable CasΦ nuclease or a variant thereof comprises at least 90% sequence identity with SEQ ID NO: 12, the 5′ overhang is a 5 nucleotide overhang. In further preferred embodiments, where the programmable CasΦ nuclease or a variant thereof comprises the amino acid sequence of SEQ ID NO: 12, the 5′ overhang is a 5 nucleotide overhang.

[0208] In some embodiments, where the programmable CasΦ nuclease or a variant thereof comprises at least 70%, at least 75%, at least 80%, at least 85%, at least 90%, at least 92%, at least 95%, at least 97%, at least 99%, or 100% sequence identity with SEQ ID NO: 24, the 5′ overhang is a 6 nucleotide overhang. In preferred embodiments, where the programmable CasΦ nuclease or a variant thereof comprises at least 90% sequence identity with SEQ ID NO: 24, the 5′ overhang is a 6 nucleotide overhang. In further preferred embodiments, where the programmable CasΦ nuclease or a variant thereof comprises the amino acid sequence of SEQ ID NO: 24, the 5′ overhang is a 6 nucleotide overhang.

[0209] In some embodiments, where the programmable CasΦ nuclease or a variant thereof comprises at least 70%, at least 75%, at least 80%, at least 85%, at least 90%, at least 92%, at least 95%, at least 97%, at least 99%, or 100% sequence identity with SEQ ID NO: 25, the 5′ overhang is a 6 nucleotide overhang. In preferred embodiments, where the programmable CasΦ nuclease or a variant thereof comprises at least 90% sequence identity with SEQ ID NO: 25, the 5′ overhang is a 6 nucleotide overhang. In further preferred embodiments, where the programmable CasΦ nuclease or a variant thereof comprises the amino acid sequence of SEQ ID NO: 25, the 5′ overhang is a 6 nucleotide overhang.

[0210] In some embodiments, where the programmable CasΦ nuclease or a variant thereof comprises at least 70%, at least 75%, at least 80%, at least 85%, at least 90%, at least 92%, at least 95%, at least 97%, at least 99%, or 100% sequence identity with SEQ ID NO: 32, the 5′ overhang is a 6 nucleotide overhang. In preferred embodiments, where the programmable CasΦ nuclease or a variant thereof comprises at least 90% sequence identity with SEQ ID NO: 32, the 5′ overhang is a 6 nucleotide overhang. In further preferred embodiments, where the programmable CasΦ nuclease or a variant thereof comprises the amino acid sequence of SEQ ID NO: 32, the 5′ overhang is a 6 nucleotide overhang.

[0211] In some embodiments, where the programmable CasΦ nuclease or a variant thereof comprises at least 70%, at least 75%, at least 80%, at least 85%, at least 90%, at least 92%, at least 95%, at least 97%, at least 99%, or 100% sequence identity with SEQ ID NO: 33, the 5′ overhang is a 6 nucleotide overhang. In preferred embodiments, where the programmable CasΦ nuclease or a variant thereof comprises at least 90% sequence identity with SEQ ID NO: 33, the 5′ overhang is a 6 nucleotide overhang. In further preferred embodiments, where the programmable CasΦ nuclease or a variant thereof comprises the amino acid sequence of SEQ ID NO: 33, the 5′ overhang is a 6 nucleotide overhang.

[0212] In some embodiments, a programmable CasΦ nuclease rapidly cleaves a strand of a double-stranded target nucleic acid. In some embodiments, the programmable CasΦ nuclease cleaves the second strand of the target nucleic acid after it has cleaved the first strand of the target nucleic acid. The cleavage of target nucleic acid strands can be assessed in an in vitro cis-cleavage assay. To perform such as assay, the programmable CasΦ nuclease is complexed to its native crRNA, e.g. CasΦ.2 nuclease with the CasΦ.2 repeat, in buffer comprising 50 mM potassium acetate, 20 mM Tris-acetate, 10 mM magnesium acetate, 100 ug/ml BSA, and which is pH 7.9 at 25° C. The complexing is carried out for 20 minutes at room temperature, e.g. 20-22° C. The RNP is at a concentration of 200 nM. The target plasmid is a 2.2 kb super-coiled plasmid containing a target sequence, either 5′-TATTAAATACTCGTATTGCTGTTCGATTAT-3′ (SEQ ID NO: 116) or 5′-CACAGCTTGTCTGTAAGCGGATGCCATATG-3′ (SEQ ID NO: 117), which is immediately downstream of a 5′-GTTG-3′ or 5′-TTTG-3′ PAM. At time “0” 30 equal volumes of target plasmid, at 20 nM, and complexed RNP are mixed, so that the concentration of target plasmid is 10 nM and the concentration of complexed RNP is 100 nM. The incubation temperature is 37° C. The reaction is quenched at desired time points, e.g. 1, 3, 6, 15, 30 and 60 minutes, with reaction quench comprising 1 mg/ml proteinase K, 0.08% SDS and 15 mM EDTA. The sample incubates for 30 minutes at 37° C. to deproteinize. The cleavage is quantified by agarose gel analysis.

[0213] In some embodiments, a programmable CasΦ nuclease creates at least 50%, at least 55%, at least 60%, at least 65%, at least 70%, at least 75%, at least 80%, at least 85%, at least 90 or at least 95% of the maximum amount of nicked product within 1 minute, where the maximum amount of nicked product is the maximum amount detected within a 60 minute period from when the target plasmid is mixed with the programmable CasΦ nuclease. In preferred embodiments, at least 80% of the maximum amount of nicked product is created within 1 minute. In more preferred embodiments, at least 90% of the maximum amount of nicked product is created within 1 minute.

[0214] In some embodiments, a programmable CasΦ nuclease creates at least 50%, at least 55%, at least 60%, at least 65%, at least 70%, at least 75%, at least 80%, at least 85%, at least 90 or at least 95% of the maximum amount of linearized product is created within 1 minute, where the maximum amount of linearized product is the maximum amount detected within a 60 minute period from when the target plasmid is mixed with the programmable CasΦ nuclease. In preferred embodiments, at least 80% of the maximum amount of linearized product is created within 1 minute. In more preferred embodiments, at least 90% of the maximum amount of linearized product is created within 1 minute.

[0215] In some embodiments, a programmable CasΦ nuclease uses a co-factor. In some embodiments, the co-factor allows the programmable CasΦ nuclease to perform a function. In some embodiments, the function is pre-crRNA processing and/or target nucleic acid cleavage. As discussed in Jiang F. and Doudna J. A. (Annu. Rev. Biophys. 2017. 46:505-29), Cas9 uses divalent metal ions as co-factors. The suitability of a divalent metal ion as a cofactor can easily be assessed, such as by methods based on those described by Sundaresan et al. (Cell Rep. 2017 Dec. 26; 21(13): 3728-3739). In some embodiments, the co-factor is a divalent metal ion. In some embodiments, the divalent metal ion is selected from Mg²⁺, Mn²⁺, Zn²⁺, Ca²⁺, Cu²⁺. In a preferred embodiment, the divalent metal ion is Mg²⁺. In some embodiments, a programmable CasΦ nuclease forms a complex with a divalent metal ion. In preferred embodiments, a programmable CasΦ nuclease forms a complex with Mg²⁺.

[0216] In some aspects, the disclosure provides a composition comprising a programmable CasΦ nuclease disclosed herein and a cell, preferably wherein the cell is a eukaryotic cell. In some embodiments, a programmable CasΦ nuclease disclosed herein is in a cell, preferably wherein the cell is a eukaryotic cell.

[0217] In some aspects, the disclosure provides a composition comprising a nucleic acid encoding a programmable CasΦ nuclease disclosed herein and a cell, preferably wherein the cell is a eukaryotic cell. In some embodiments, a nucleic acid encoding a programmable CasΦ nuclease disclosed herein is in a cell, preferably wherein the cell is a eukaryotic cell.

### Guide Nucleic Acids

[0218] The methods and compositions of the disclosure may comprise a guide nucleic acid. The guide nucleic acid can bind to a target nucleic acid (e.g., a single strand of a target nucleic acid) or portion thereof. For example, the guide nucleic acid can bind to a target nucleic acid such as nucleic acid from a virus or a bacterium or other agents responsible for a disease, or an amplicon thereof, as described herein. The guide nucleic acid can bind to a target nucleic acid such as a nucleic acid from a bacterium, a virus, a parasite, a protozoa, a fungus or other agents responsible for a disease, or an amplicon thereof, as described herein. The target nucleic acid can comprise a mutation, such as a single nucleotide polymorphism (SNP). A mutation can confer for example, resistance to a treatment, such as antibiotic treatment. A mutation can confer a gene malfunction or gene knockout. A mutation can confer a disease, contribution to a disease, or risk for a disease, such as a liver disease or disorder, eye disease or disorder, cystic fibrosis, or muscle disease or disorder. The guide nucleic acid can bind to a target nucleic acid such as a nucleic acid, preferably DNA, from a cancer gene or gene associated with a genetic disorder, or an amplicon thereof, as described herein. The guide nucleic acid comprises a segment of nucleic acids that are reverse complementary to the target nucleic acid. Often the guide nucleic acid binds specifically to the target nucleic acid. The target nucleic acid may be a reversed transcribed RNA, DNA, DNA amplicon, or synthetic nucleic acids. The target nucleic acid can be a single-stranded DNA or DNA amplicon of a nucleic acid of interest. A guide nucleic acid may be a non-naturally occurring guide nucleic acid. A non-naturally occurring guide nucleic acid may comprise an engineered sequence having a repeat and a spacer that hybridizes to a target nucleic acid sequence of interest. A non-naturally occurring guide nucleic acid may be recombinantly expressed or chemically synthesized.

[0219] A guide nucleic acid (e.g. gRNA) may hybridize to a target sequence of a target nucleic acid. The guide nucleic acid can bind to a programmable nuclease.

[0220] In some embodiments, a gRNA comprises a crRNA. In some embodiments, a gRNA of a CasΦ polypeptide or variants thereof does not comprise a tracrRNA. As described by Jiang F. and Doudna J. A. (Annu. Rev. Biophys. 2017. 46:505-29), Cas9 cleavage activity requires a tracrRNA. A tracrRNA is a polynucleotide that hybridizes with a crRNA to allow crRNA maturation such that the crRNA can bind to the Cas nuclease and locate the Cas nuclease to a target sequence. In some embodiments, a programmable CasΦ nuclease disclosed herein does not require a tracrRNA to locate and/or cleave a target nucleic acid. A crRNA may comprise a repeat region. Specifically, the crRNA of the guide nucleic acid may comprise a repeat region and a spacer region. The repeat region refers to the sequence of the crRNA that binds to the programmable nuclease. The spacer region refers to the sequence of the crRNA that hybridizes to a sequence of the target nucleic acid. In some embodiments, the repeat region may comprise mutations or truncations with respect to the repeat sequences in pre-crRNA. The repeat sequence of the crRNA may interact with a programmable nuclease, allowing for the guide nucleic acid and the programmable nuclease to form a complex. This complex may be referred to as a ribonucleoprotein (RNP) complex. The crRNA may comprise a spacer sequence. The spacer sequence may hybridize to a target sequence of the target nucleic acid, where the target sequence is a segment of a target nucleic acid. The spacer sequences may be reverse complementary to the target sequence. In some cases, the spacer sequence may be sufficiently reverse complementary to a target sequence to allow for hybridization, however, may not necessarily be 100% reverse complementary.

[0221] In some embodiments, a programmable nuclease may cleave a precursor RNA (“pre-crRNA”) to produce (or “process”) a guide RNA (gRNA), also referred to as a “mature guide RNA.” A programmable nuclease that cleaves pre-crRNA to produce a mature guide RNA is said to have pre-crRNA processing activity.

[0222] Programmable nucleases disclosed herein may process the repeat sequence of a crRNA, where the repeat sequence is the region of the crRNA that binds to the programmable nuclease. For example, crRNA may be delivered to a mammalian cell, e.g. a HEK293T cell, wherein the crRNA includes a full length repeat region which is 36 nucleotides in length, along with a programmable nuclease. The programmable nuclease then cleaves the repeat region of the crRNA so that the mature crRNA comprises a shorter repeat region (e.g. 24 nucleotides in length). Accordingly, in some embodiments, programmable nucleases disclosed herein are capable of cleaving the repeat region of a crRNA. In preferred embodiments, programmable nucleases disclosed herein are capable of cleaving the repeat region of a crRNA in mammalian cells.

[0223] The guide nucleic acid can bind specifically to the target nucleic acid. A guide nucleic acid can comprise a sequence that is, at least in part, reverse complementary to the sequence of a target nucleic acid.

[0224] The guide nucleic acid may be a non-naturally occurring guide nucleic acid. A non-naturally occurring guide nucleic acid may comprise an engineered sequence having a repeat and a spacer that hybridizes to a target nucleic acid sequence of interest. A non-naturally occurring guide nucleic acid may be recombinantly expressed or chemically synthesized.

[0225] A guide nucleic acid can comprise RNA, DNA, or a combination thereof. The term “gRNA” refers to a guide nucleic acid comprising RNA. A gRNA may include nucleosides that are not ribonucleic. In some embodiments, all nucleosides in a gRNA are ribonucleic. In some embodiments, some of the nucleosides in a gRNA are not ribonucleic. In embodiments where nucleosides in a gRNA are not ribonucleic, non-ribonucleic nucleosides may be naturally-occurring or non-naturally-occurring nucleosides. In some embodiments, inter-nucleoside links are phosphodiester bonds. In some embodiments, the inter-nucleoside link between at least two nucleosides in a guide nucleic acid is not a phosphodiester bond. In some embodiments, the inter-nucleoside link between at least two nucleosides is a non-natural inter-nucleoside linkage. Non-natural inter-nucleoside linkages include phosphorous and non-phosphorous inter-nucleoside linkages. Phosphorous inter-nucleoside linkages include phosphorothioate linkages and thiophosphate linkages. An inter-nucleoside linkage may comprise a “C3 spacer”. C3 spacers are known to the skilled person as comprising a chain of three carbon atoms.

[0226] Guide nucleic acids may be modified to improve genome editing efficiency, increase stability, reduce off-target effects, and/or increase the affinity of the guide nucleic acid for a CasΦ polypeptide disclosed herein. Modifications may include non-natural nucleotides and/or non-natural linkages. In addition or alternatively, one or more sugar moieties of the guide nucleic acid may be modified. Such sugar moiety modifications may include 2′-O-methyl (2′OMe,), 2′-0-methyoxy-ethyl and 2′ fluoro. In some embodiments, editing efficiency, or genome editing efficiency, is determined by analyzing the frequency of indel mutations in a nucleic acid or gene knockout. In some embodiments, the use of a flow cytometer or next generation sequencing may be used to analyze cells for indel mutations or gene knockout. In other embodiments, off-target effects may be detected using a flow cytometer, next generation sequencing, or CIRCLE-seq.

[0227] In some preferred embodiments, first 3 nucleosides (or one of the first 3 nucleosides, or a combination of the first 3 nucleosides) from the 5′ end of the repeat region comprise a 2′-O-methyl modification and the linkages between the 3 nucleosides at the 3′ end of the spacer region comprise phosphorothioate linkages.

[0228] In some embodiments, the first nucleoside at the 5′ end of the repeat region comprises a 2′-O-methyl modification. In some embodiments, the first two nucleosides at the 5′ end of the repeat region comprise 2′-O-methyl modifications. In some embodiments, the first three nucleosides at the 5′ end of the repeat region comprise 2′-O-methyl modifications. In some embodiments, the last nucleoside at the 3′ end of the spacer region comprises a 2′-O-methyl modification. In some embodiments, the last two nucleosides at the 3′ end of the spacer region comprise 2′-O-methyl modifications. In some embodiments, the last three nucleosides at the 3′ end of the spacer region comprise 2′-O-methyl modifications.

[0229] In some embodiments, the first 3 nucleosides (or one of the first 3 nucleosides, or a combination of the first 3 nucleosides) from the 5′ end of the repeat region and the 3 nucleosides at the 3′ end of the spacer region comprise a 2′-O-methyl modification, and the linkages between the 3 nucleosides at the 3′ end of the spacer region comprise phosphorothioate linkages.

[0230] In some embodiments, the first 3 nucleosides (or one of the first 3 nucleosides, or a combination of the first 3 nucleosides) from the 5′ end of the repeat region and the 3 nucleosides at the 3′ end of the spacer region comprise a 2′ fluoro modification.

[0231] In some embodiments, the first nucleoside at the 5′ end of the repeat region comprises a 2′ fluoro modification. In some embodiments, the first two nucleosides at the 5′ end of the repeat region comprise 2′ fluoro modifications. In some embodiments, the first three nucleosides at the 5′ end of the repeat region comprise 2′ fluoro modifications. In some embodiments, the last nucleoside at the 3′ end of the spacer region comprises a 2′ fluoro modification. In some embodiments, the last two nucleosides at the 3′ end of the spacer region comprise 2′ fluoro modifications. In some embodiments, the last three nucleosides at the 3′ end of the spacer region comprise 2′ fluoro modifications. In preferred embodiments, the last three nucleosides at the 3′ end of the spacer region comprise 2′ fluoro modifications.

[0232] In preferred embodiments, the first two nucleosides at the 5′ end of the repeat region comprise 2′-O-methyl modifications, the first two nucleosides at the 5′ end of the repeat are linked by a phosphorothioate linkage, and the last three nucleosides at the 3′ end of the spacer region comprise 2′ fluoro modifications.

[0233] In some embodiments, the linkage between the two nucleosides at the 5′ end of the repeat region comprises a 3C spacer and the linkage between the two nucleosides at the 3′ end of the spacer region comprises a 3C spacer.

[0234] In some embodiments, the guide nucleic acid comprises ribonucleic nucleosides and deoxyribonucleic nucleosides. In some embodiments, the guide nucleic acid is a guide RNA wherein the first, eighth and ninth nucleosides from the 5′ end of the spacer region and the four nucleosides at the 3′ end of the spacer region are deoxyribonucleic nucleosides.

[0235] In some embodiments, the guide nucleic acid comprises a polyA tail. In some preferred embodiments, the guide nucleic acid comprises a polyA tail at the 3′ end of the spacer region.

[0236] In some embodiments, a plurality of modified guides (e.g., a combination of modified guides disclosed herein) are complexed with one or more programmable nucleases (e.g., one or more programmable nucleases disclosed herein). In some examples, one or more of the plurality of modified guides comprise any of the nucleoside modifications described herein. In some examples, one or more of the plurality of the modified guides comprise any length of repeat or spacer region described herein. In some examples, one or more of the plurality of the modified guides comprise a repeat spacer length described herein, and a nucleoside modification described herein. In some embodiments, one or more of the plurality of modified guides comprise a repeat sequence from about 15 to about 20 nucleotides in length. In some embodiments, one or more of the plurality of modified guides comprise a spacer sequence or region from about 15 to about 20 nucleotides in length.

[0237] TABLE 2 provides illustrative crRNA sequences for use with the compositions and methods of the disclosure. In some embodiments, the crRNA sequence comprises at least 70%, at least 80%, at least 90%, at least 92%, at least 95%, at least 97%, or at least 99%, or 100% sequence identity to any one of SEQ ID NO: 48-SEQ ID NO: 86, or a reverse complement thereof. In some embodiments, the crRNA sequence comprises at least 70%, at least 80%, at least 90%, at least 92%, at least 95%, at least 97%, at least 99%, or 100% sequence identity to SEQ ID NO: 49 or a reverse complement thereof. In some embodiments, the crRNA sequence comprises at least 70%, at least 80%, at least 90%, at least 92%, at least 95%, at least 97%, at least 99%, or 100% sequence identity to SEQ ID NO: 51 or a reverse complement thereof. In some embodiments, the crRNA sequence comprises at least 70%, at least 80%, at least 90%, at least 92%, at least 95%, at least 97%, at least 99%, or 100% sequence identity to SEQ ID NO: 52 or a reverse complement thereof. In some embodiments, the crRNA sequence comprises at least 70%, at least 80%, at least 90%, at least 92%, at least 95%, at least 97%, at least 99%, or 100% sequence identity to SEQ ID NO: 54 or a reverse complement thereof. In some embodiments, the crRNA sequence comprises at least 70%, at least 80%, at least 90%, at least 92%, at least 95%, at least 97%, at least 99%, or 100% sequence identity to SEQ ID NO: 57 or a reverse complement thereof.

TABLE 2
Illustrative crRNA sequences

| CasΦ | crRNA repeat sequence | SEQ ID. |
|---|---|---|
| ortholog | (shown as DNA), 5′-to-3′ | NO. |
| CasΦ.01 | GGAGAGATCTCAAACGATTGCTCGATTAGTCGAGAC | 48 |
| CasΦ.02 | GTCGGAACGCTCAACGATTGCCCCTCACGAGGGGAC | 49 |
| CasΦ.04 | ACCAAAACGACTATTGATTGCCCAGTACGCTGGGAC | 50 |
| CasΦ.07 | GGATCCAATCCTTTTTGATTGCCCAATTCGTTGGGAC | 51 |
| CasΦ.10 | GGATCTGAGGATCATTATTGCTCGTTACGACGAGAC | 52 |
| CasΦ.11 | CCTGCGAAACCTTTTGATTGCTCAGTACGCTGAGAC | 53 |
| CasΦ.12 | CTTTCAAGACTAATAGATTGCTCCTTACGAGGAGAC | 54 |
| CasΦ.13 | GTAGAAGACCTCGCTGATTGCTCGGTGCGCCGAGAC | 55 |
| CasΦ.17 | ATGGCAACAGACTCTCATTGCGCGGTACGCCGCGAC | 56 |
| CasΦ.18 | ACCAAAACGACTATTGATTGCCCAGTACGCTGGGAC | 57 |
| CasΦ.19 | GTCGCTCTCTAACGCTTGCCCAGTACGCTGGGAC | 58 |
| CasΦ.20 | GCTGGAAGACTCAATGATGGCTCCTTACGAGGAGAC | 59 |
| CasΦ.21 | GGTTGAACCCTCAACAGATTGCTCGGTAAGCCGAGAC | 60 |
| CasΦ.22 | GGTTGAACCCTCAACAGATTGCTCGGTAAGCCGAGAC | 61 |
| CasΦ.23 | CTTGAAATCCTGTCAGATTGCTCCCTTCGGGGAGAC | 62 |
| CasΦ.24 | GCTGGAAGACTCAATGATGGCTCCTTACGAGGAGAC | 63 |
| CasΦ.25 | GCTGGAAGACTCAATGATGGCTCCTTACGAGGAGAC | 64 |
| CasΦ.26 | CTAGGAACGCACGCAGATTGCTCGGTACGCCGAGAC | 65 |
| CasΦ.27 | ATTGCAACGCCTAAAGATTGCTCGATACGTCGAGAC | 66 |
| CasΦ.28 | GTTCGGCRAYCCTTTGATTGCTCAGTACGCTGAGAC | 67 |
| CasΦ.29 | GTTGAACCTAGATCAGATGGCTCAGTACGCTGAGAC | 68 |
| CasΦ.30 | CCCTCAACACGTCAGAAATGCCCGGCACGCCGGGAC | 69 |
| CasΦ.31 | GTCGCAAGACTCGAATAATTGCCCCTCTATGGGGAC | 70 |
| CasΦ.32 | GCTGGGGACCGATCCTGATTGCTCGCTGCGGCGAGAC | 71 |
| CasΦ.33 | CTCTCAATGGATAACGATTGCTCTCTACGGAGAGAC | 72 |
| CasΦ.34 | GCTGGAAGACTCAATGATGGCTCCTTACGAGGAGAC | 73 |
| CasΦ.35 | GTTGAACCCTCAACAGATTGCTCGGTAAGCCGAGAC | 74 |
| CasΦ.36 | GTCGCAAGACTCGAATAATTGCCCCTCTATGGGGAC | 75 |
| CasΦ.37 | GTCGGAACGCTCAACGATTGCCCCTCACGAGGGGAC | 76 |
| CasΦ.38 | GTTGAACCTAGATCAGATGGCTCAGTACGCTGAGAC | 77 |
| CasΦ.39 | CTCTCAATGGATAACGATTGCTCTCTACGGAGAGAC | 78 |
| CasΦ.41 | ACTGAAACCACCAACGATTGCGCTCCTCGGAGCGAC | 79 |
| CasΦ.42 | ACCAAAACGACTATTGATTGCCCAGTACGCTGGGAC | 80 |
| CasΦ.43 | GTTGAACCTAGATCAGATGGCTCAGTACGCTGAGAC | 81 |
| CasΦ.44 | GTTGAACCCTCAACAGATTGCTCGGTAAGCCGAGAC | 82 |
| CasΦ.45 | GTTGAACCTAGATCAGATGGCTCAGTACGCTGAGAC | 83 |
| CasΦ.46 | GTCGGAACGCTCAACGATTGCCCCTCACGAGGGGAC | 84 |
| CasΦ.47 | GGTTGAACCCTCAACAGATTGCTCGGTAAGCCGAGAC | 85 |
| CasΦ.48 | GGTTGAACCCTCAACAGATTGCTCGGTAAGCCGAGAC | 86 |

[0238] In some embodiments, the programmable nuclease disclosed herein is used in conjunction with a specific crRNA sequence. In some embodiments, the crRNA sequence comprises at least 70%, at least 80%, at least 90%, at least 92%, at least 95%, at least 97%, at least 99%, or 100% sequence identity to any one of SEQ ID NO: 48-SEQ ID NO: 86, or a reverse complement thereof. In some embodiments, the crRNA sequence comprises at least 70%, at least 80%, at least 90%, at least 92%, at least 95%, at least 97%, at least 99%, or 100% sequence identity to SEQ ID NO: 49 or a reverse complement thereof. In some embodiments, the crRNA sequence comprises at least 70%, at least 80%, at least 90%, at least 92%, at least 95%, at least 97%, at least 99%, or 100% sequence identity to SEQ ID NO: 51 or a reverse complement thereof. In some embodiments, the crRNA sequence comprises at least 70%, at least 80%, at least 90%, at least 92%, at least 95%, at least 97%, at least 99%, or 100% sequence identity to SEQ ID NO: 52 or a reverse complement thereof. In some embodiments, the crRNA sequence comprises at least 70%, at least 80%, at least 90%, at least 92%, at least 95%, at least 97%, at least 99%, or 100% sequence identity to SEQ ID NO: 54 or a reverse complement thereof. In some embodiments, the crRNA sequence comprises at least 70%, at least 80%, at least 90%, at least 92%, at least 95%, at least 97%, at least 99%, or 100% sequence identity to SEQ ID NO: 57 or a reverse complement thereof.

[0239] In some embodiments, the activity of a programmable CasΦ nuclease can be supported by a crRNA comprising any of the crRNA repeat sequences recited in TABLE 2. In some embodiments, the activity of a programmable CasΦ nuclease can be supported by a crRNA comprising a crRNA repeat sequence comprising at least 70%, at least 80%, at least 90%, at least 92%, at least 95%, at least 97%, at least 99%, or 100% sequence identity to any one of SEQ ID NO: 48-SEQ ID NO: 86.

[0240] In some embodiments, the crRNA repeat sequence comprises a hairpin. In some embodiments, the hairpin is in the 3′ portion of the crRNA repeat sequence. The hairpin comprises a double-stranded stem portion and a single-stranded loop portion. In preferred embodiments, one stand of the stem portion comprises a CYC sequence and the other strand comprises a GRG sequence, wherein Y and R are complementary. In preferred embodiments, the crRNA repeat comprises a GAC sequence at the 3′ end. In more preferred embodiments, the G of the GAC sequence is in the stem portion of the hairpin. In some embodiments, each strand of the stem portion comprises 3, 4, 5, 6, 7, 8, 9 or 10 nucleotides. In preferred embodiments, each strand of the stem portion comprises 3, 4 or 5 nucleotides. In some embodiments, the loop portion comprises 2, 3, 4, 5, 6, 7, 8, 9, 10 or more nucleotides. In preferred embodiments, the loop portion comprises 2, 3, 4, 5 or 6 nucleotides. In most preferred embodiments, the loop portion comprises 4 nucleotides. In some embodiments, the nucleotides are naturally occurring nucleotides. In some embodiments, the nucleotides are synthetic nucleotides.

[0241] In some cases, the guide nucleic acid is not naturally occurring and made by artificial combination of otherwise separate segments of sequence. Often, the artificial combination is performed by chemical synthesis, by genetic engineering techniques, or by the artificial manipulation of isolated segments of nucleic acids. In some cases, the segment of a guide nucleic acid that comprises a sequence that is reverse complementary to the target nucleic acid is 20 nucleotides in length. A guide nucleic acid can have at least 10, 11, 12, 13, 14, 15, 16, 17, 18, 19, 20, 21, 22, 23, 24, 25, 26, 27, 28, 29, or 30 nucleotides reverse complementary to a target nucleic acid. In some cases, the guide nucleic acid can be 10, 11, 12, 13, 14, 15, 16, 17, 18, 19, 20, 21, 22, 23, 24, 25, 26, 27, 28, 29, or 30 nucleotides in length. For example, a guide nucleic acid may be at least 10 bases. In some embodiments, a guide nucleic acid may be from 10 to 50 bases. In some embodiments, a guide nucleic acid may be at least 25 bases. In some cases, the guide nucleic acid has from exactly or about 12 nucleotides (nt) to about 80 nt, from about 12 nt to about 50 nt, from about 12 nt to about 45 nt, from about 12 nt to about 40 nt, from about 12 nt to about 35 nt, from about 12 nt to about 30 nt, from about 12 nt to about 25 nt, from about 12 nt to about 20 nt, from about 12 nt to about 19 nt, from about 19 nt to about 20 nt, from about 19 nt to about 25 nt, from about 19 nt to about 30 nt, from about 19 nt to about 35 nt, from about 19 nt to about 40 nt, from about 19 nt to about 45 nt, from about 19 nt to about 50 nt, from about 19 nt to about 60 nt, from about 20 nt to about 25 nt, from about 20 nt to about 30 nt, from about 20 nt to about 35 nt, from about 20 nt to about 40 nt, from about 20 nt to about 45 nt, from about 20 nt to about 50 nt, or from about 20 nt to about 60 nt reverse complementary to a target nucleic acid. In some cases, the guide nucleic acid has from about 10 nt to about 60 nt, from about 20 nt to about 50 nt, or from about 30 nt to about 40 nt reverse complementary to a target nucleic acid. It is understood that the sequence of a guide nucleic acid need not be 100% reverse complementary to that of its target nucleic acid to be specifically hybridizable, hybridizable, or bind specifically. The guide nucleic acid can have a sequence comprising at least one uracil in a region from nucleic acid residue 5 to 20 that is reverse complementary to a modification variable region in the target nucleic acid. The guide nucleic acid, in some cases, has a sequence comprising at least one uracil in a region from nucleic acid residue 5 to 9, 10 to 14, or 15 to 20 that is reverse complementary to a modification variable region in the target nucleic acid. The guide nucleic acid can have a sequence comprising at least one uracil in a region from nucleic acid residue 5 to 20 that is reverse complementary to a methylation variable region in the target nucleic acid. The guide nucleic acid, in some cases, has a sequence comprising at least one uracil in a region from nucleic acid residue 5 to 9, 10 to 14, or 15 to 20 that is reverse complementary to a methylation variable region in the target nucleic acid. The guide nucleic acid can hybridize with a target nucleic acid.

[0242] In some instances, compositions comprise shorter versions of the guide nucleic acids disclosed herein. For instance, the guide nucleic acid sequence may consist of a portion of a guide nucleic acid disclosed herein. In some instances, shorter versions may provide enhanced activity relative to their longer versions. Examples of longer versions and shorter versions of guide RNA for CasΦ.12 are shown in Tables I, K, M, O, Q, S, U, and W, and Tables AB-AF, respectively, wherein the shorter versions are produced by removing sixteen nucleotides from the 5′ end of the long version and three nucleotides from the 3′ end of the long version. In some instances, the long version is a CasΦ.32 guide nucleic acid described in Tables J, L, N, P, R, T, V, X, and the short version is a guide nucleic acid without the sixteen nucleotides at the 5′ end of the long version and without the three nucleotides at the 3′ end of the long version.

[0243] The guide nucleic acid (e.g., a non-naturally occurring guide nucleic acid) can be selected from a group of guide nucleic acids that have been tiled against the nucleic acid sequence of a strain of an infection or genomic locus of interest. The guide nucleic acid can be selected from a group of guide nucleic acids that have been tiled against the nucleic acid sequence of a target nucleic acid, for example, a strain of HPV16 or HPV18. Often, guide nucleic acids that are tiled against the nucleic acid of a strain of an infection or genomic locus of interest can be pooled for use in a method described herein. Often, these guide nucleic acids are pooled for detecting a target nucleic acid in a single assay. The pooling of guide nucleic acids that are tiled against a single target nucleic acid can enhance the detection of the target nucleic using the methods described herein. The pooling of guide nucleic acids that are tiled against a single target nucleic acid can ensure broad coverage of the target nucleic acid within a single reaction using the methods described herein. The tiling, for example, is sequential along the target nucleic acid. Sometimes, the tiling is overlapping along the target nucleic acid. In some instances, the tiling comprises gaps between the tiled guide nucleic acids along the target nucleic acid. In some instances, the tiling of the guide nucleic acids is non-sequential. Often, a method for detecting a target nucleic acid comprises contacting a target nucleic acid to a pool of guide nucleic acids and a programmable nuclease or nickase as disclosed herein, wherein a guide nucleic acid sequence of the pool of guide nucleic acids has a sequence selected from a group of tiled guide nucleic acid that correspond to nucleic acid sequence of a target nucleic acid; and assaying for a signal produce by cleavage of at least some nucleic acids of a reporter of a population of nucleic acids of a reporter. Pooling of guide nucleic acids can ensure broad spectrum identification, or broad coverage, of a target species within a single reaction. This can be particularly helpful in diseases or indications, like sepsis, that may be caused by multiple organisms.

[0244] In some embodiments, the spacer sequence is between 10 and 35 nucleotides in length, between 10 and 30 nucleotides in length, between 15 and 30 nucleotides in length, between 10 and 25 nucleotides in length, between 15 and 25 nucleotides in length, between 17 and 30 nucleotides in length, between 17 and 25 nucleotides in length, between 17 and 22 nucleotides in length, or between 17 and 20 nucleotides in length. In preferred embodiments, the spacer sequence between 17 and 25 nucleotides in length. In more preferred embodiments, the spacer sequence is between 17 and 20 nucleotides in length. In most preferred embodiments, the spacer sequence is 17 nucleotides in length.

[0245] In some embodiments, the repeat sequence is between 15 and 40 nucleotides in length, between 15 and 36 nucleotides in length, between 18 and 36 nucleotides in length, between 18 and 30 nucleotides in length, between 18 and 25 nucleotides in length, between 18 and 22 nucleotides in length, between 18 and 20 nucleotides in length. In preferred embodiments, the repeat sequence is between 20 and 22 nucleotides in length. In more preferred embodiments, the repeat sequence is 20 nucleotides in length.

[0246] The spacer region of guide nucleic acids for CasΦ polypeptides disclosed herein comprise a seed region. In some embodiments, the seed regions do not tolerate mismatches in the complentarity of a spacer and a target sequence within about 1 to about 20 nucleotides from the 5′ end of a spacer sequence. The seed region starts from the 5′ end of the spacer sequence and is a region in which mismatches in the complementarity between the spacer sequence and the target sequence are not tolerated when the guide nucleic acid is bound to a CasΦ polypeptide such that the guide nucleic acid does not hybridize to the target sequence to allow cleavage of the target nucleic acid by the CasΦ polypeptide. In some embodiments, the seed region comprises between 10 and 20 nucleosides, between 12 and 20 nucleosides, between 14 and 20 nucleosides, between 14 and 18 nucleosides, between 10 and 16 nucleosides, between 12 and 16 nucleosides, or between 14 and 16 nucleosides. In preferred embodiments, the seed region comprises 16 nucleotides.

[0247] A programmable nuclease of the present disclosure may be activated to exhibit cleavage activity (e.g., cis-cleavage of a target nucleic acid or trans-cleavage of a collateral nucleic acid) upon binding of a ribonucleoprotein (RNP) complex to a target nucleic acid, in which the spacer of the crRNA of the gRNA hybridizes to the target nucleic acid.

TABLE A
spacer sequences of gRNAs targeting human TRAC in T cells

| | Spacer sequence | | |
|---|---|---|---|
| Name | (5′→3′), shown as DNA | Target | SEQ ID NO |
| R3040 | TGGATATCTGTGGGACAAGA | TRAC | 118 |
| R3041 | TCCCACAGATATCCAGAACC | TRAC | 119 |
| R3042 | GAGTCTCTCAGCTGGTACAC | TRAC | 120 |
| R3043 | AGAGTCTCTCAGCTGGTACA | TRAC | 121 |
| R3044 | TCACTGGATTTAGAGTCTCT | TRAC | 122 |
| R3045 | AGAATCAAAATCGGTGAATA | TRAC | 123 |
| R3046 | GAGAATCAAAATCGGTGAAT | TRAC | 124 |
| R3047 | ACCGATTTTGATTCTCAAAC | TRAC | 125 |
| R3048 | TTTGAGAATCAAAATCGGTG | TRAC | 126 |
| R3049 | GTTTGAGAATCAAAATCGGT | TRAC | 127 |
| R3050 | TGATTCTCAAACAAATGTGT | TRAC | 128 |
| R3051 | GATTCTCAAACAAATGTGTC | TRAC | 129 |
| R3052 | ATTCTCAAACAAATGTGTCA | TRAC | 130 |
| R3053 | TGACACATTTGTTTGAGAAT | TRAC | 131 |
| R3054 | TCAAACAAATGTGTCACAAA | TRAC | 132 |
| R3055 | GTGACACATTTGTTTGAGAA | TRAC | 133 |
| R3056 | CTTTGTGACACATTTGTTTG | TRAC | 134 |
| R3057 | TGATGTGTATATCACAGACA | TRAC | 135 |
| R3058 | TCTGTGATATACACATCAGA | TRAC | 136 |
| R3059 | GTCTGTGATATACACATCAG | TRAC | 137 |
| R3060 | TGTCTGTGATATACACATCA | TRAC | 138 |
| R3061 | AAGTCCATAGACCTCATGTC | TRAC | 139 |
| R3062 | CTCTTGAAGTCCATAGACCT | TRAC | 140 |
| R3063 | AAGAGCAACAGTGCTGTGGC | TRAC | 141 |
| R3064 | CTCCAGGCCACAGCACTGTT | TRAC | 142 |
| R3065 | TTGCTCCAGGCCACAGCACT | TRAC | 143 |
| R3066 | GTTGCTCCAGGCCACAGCAC | TRAC | 144 |
| R3067 | CACATGCAAAGTCAGATTTG | TRAC | 145 |
| R3068 | GCACATGCAAAGTCAGATTT | TRAC | 146 |
| R3069 | GCATGTGCAAACGCCTTCAA | TRAC | 147 |
| R3070 | AAGGCGTTTGCACATGCAAA | TRAC | 148 |
| R3071 | CATGTGCAAACGCCTTCAAC | TRAC | 149 |
| R3072 | TTGAAGGCGTTTGCACATGC | TRAC | 150 |
| R3073 | AACAACAGCATTATTCCAGA | TRAC | 151 |
| R3074 | TGGAATAATGCTGTTGTTGA | TRAC | 152 |
| R3075 | TTCCAGAAGACACCTTCTTC | TRAC | 153 |
| R3076 | CAGAAGACACCTTCTTCCCC | TRAC | 154 |
| R3077 | CCTGGGCTGGGGAAGAAGGT | TRAC | 155 |
| R3078 | TTCCCCAGCCCAGGTAAGGG | TRAC | 156 |
| R3079 | CCCAGCCCAGGTAAGGGCAG | TRAC | 157 |
| R3080 | TAAAAGGAAAAACAGACATT | TRAC | 158 |
| R3081 | CTAAAAGGAAAAACAGACAT | TRAC | 159 |
| R3082 | TTCCTTTTAGAAAGTTCCTG | TRAC | 160 |
| R3083 | TCCTTTTAGAAAGTTCCTGT | TRAC | 161 |
| R3084 | CCTTTTAGAAAGTTCCTGTG | TRAC | 162 |
| R3085 | CTTTTAGAAAGTTCCTGTGA | TRAC | 163 |
| R3086 | TAGAAAGTTCCTGTGATGTC | TRAC | 164 |
| R3136 | AGAAAGTTCCTGTGATGTCA | TRAC | 165 |
| R3137 | GAAAGTTCCTGTGATGTCAA | TRAC | 166 |
| R3138 | ACATCACAGGAACTTTCTAA | TRAC | 167 |
| R3139 | CTGTGATGTCAAGCTGGTCG | TRAC | 168 |
| R3140 | TCGACCAGCTTGACATCACA | TRAC | 169 |
| R3141 | CTCGACCAGCTTGACATCAC | TRAC | 170 |
| R3142 | TCTCGACCAGCTTGACATCA | TRAC | 171 |
| R3143 | AAAGCTTTTCTCGACCAGCT | TRAC | 172 |
| R3144 | CAAAGCTTTTCTCGACCAGC | TRAC | 173 |
| R3145 | CCTGTTTCAAAGCTTTTCTC | TRAC | 174 |
| R3146 | GAAACAGGTAAGACAGGGGT | TRAC | 175 |
| R3147 | AAACAGGTAAGACAGGGGTC | TRAC | 176 |

TABLE B
spacer sequences of gRNAs targeting human B2M in T cells

| | Spacer Sequence | | |
|---|---|---|---|
| Name | (5′→3′), shown as DNA | Target | SEQ ID NO |
| R3087 | AATATAAGTGGAGGCGTCGC | B2M | 177 |
| R3088 | ATATAAGTGGAGGCGTCGCG | B2M | 178 |
| R3089 | AGGAATGCCCGCCAGCGCGA | B2M | 179 |
| R3090 | CTGAAGCTGACAGCATTCGG | B2M | 180 |
| R3091 | GGGCCGAGATGTCTCGCTCC | B2M | 181 |
| R3092 | GCTGTGCTCGCGCTACTCTC | B2M | 182 |
| R3093 | CTGGCCTGGAGGCTATCCAG | B2M | 183 |
| R3094 | TGGCCTGGAGGCTATCCAGC | B2M | 184 |
| R3095 | ATGTGTCTTTTCCCGATATT | B2M | 185 |
| R3096 | TCCCGATATTCCTCAGGTAC | B2M | 186 |
| R3097 | CCCGATATTCCTCAGGTACT | B2M | 187 |
| R3098 | CCGATATTCCTCAGGTACTC | B2M | 188 |
| R3099 | GAGTACCTGAGGAATATCGG | B2M | 189 |
| R3100 | GGAGTACCTGAGGAATATCG | B2M | 190 |
| R3101 | CTCAGGTACTCCAAAGATTC | B2M | 191 |
| R3102 | AGGTTTACTCACGTCATCCA | B2M | 192 |
| R3103 | ACTCACGTCATCCAGCAGAG | B2M | 193 |
| R3104 | CTCACGTCATCCAGCAGAGA | B2M | 194 |
| R3105 | TCTGCTGGATGACGTGAGTA | B2M | 195 |
| R3106 | CATTCTCTGCTGGATGACGT | B2M | 196 |
| R3107 | CCATTCTCTGCTGGATGACG | B2M | 197 |
| R3108 | ACTTTCCATTCTCTGCTGGA | B2M | 198 |
| R3109 | GACTTTCCATTCTCTGCTGG | B2M | 199 |
| R3110 | AGGAAATTTGACTTTCCATT | B2M | 200 |
| R3111 | CCTGAATTGCTATGTGTCTG | B2M | 201 |
| R3112 | CTGAATTGCTATGTGTCTGG | B2M | 202 |
| R3113 | CTATGTGTCTGGGTTTCATC | B2M | 203 |
| R3114 | AATGTCGGATGGATGAAACC | B2M | 204 |
| R3115 | CATCCATCCGACATTGAAGT | B2M | 205 |
| R3116 | ATCCATCCGACATTGAAGTT | B2M | 206 |
| R3117 | AGTAAGTCAACTTCAATGTC | B2M | 207 |
| R3118 | TTCAGTAAGTCAACTTCAAT | B2M | 208 |
| R3119 | AAGTTGACTTACTGAAGAAT | B2M | 209 |
| R3120 | ACTTACTGAAGAATGGAGAG | B2M | 210 |
| R3121 | TCTCTCCATTCTTCAGTAAG | B2M | 211 |
| R3122 | CTGAAGAATGGAGAGAGAAT | B2M | 212 |
| R3123 | AATTCTCTCTCCATTCTTCA | B2M | 213 |
| R3124 | CAATTCTCTCTCCATTCTTC | B2M | 214 |
| R3125 | TCAATTCTCTCTCCATTCTT | B2M | 215 |
| R3126 | TTCAATTCTCTCTCCATTCT | B2M | 216 |
| R3127 | AAAAAGTGGAGCATTCAGAC | B2M | 217 |
| R3128 | CTGAAAGACAAGTCTGAATG | B2M | 218 |
| R3129 | AGACTTGTCTTTCAGCAAGG | B2M | 219 |
| R3130 | TCTTTCAGCAAGGACTGGTC | B2M | 220 |
| R3131 | CAGCAAGGACTGGTCTTTCT | B2M | 221 |
| R3132 | AGCAAGGACTGGTCTTTCTA | B2M | 222 |
| R3133 | CTATCTCTTGTACTACACTG | B2M | 223 |
| R3134 | TATCTCTTGTACTACACTGA | B2M | 224 |
| R3135 | AGTGTAGTACAAGAGATAGA | B2M | 225 |
| R3148 | TACTACACTGAATTCACCCC | B2M | 226 |
| R3149 | AGTGGGGGTGAATTCAGTGT | B2M | 227 |
| R3150 | CAGTGGGGGTGAATTCAGTG | B2M | 228 |
| R3151 | TCAGTGGGGGTGAATTCAGT | B2M | 229 |
| R3152 | TTCAGTGGGGGTGAATTCAG | B2M | 230 |
| R3153 | ACCCCCACTGAAAAAGATGA | B2M | 231 |
| R3154 | ACACGGCAGGCATACTCATC | B2M | 232 |
| R3155 | GGCTGTGACAAAGTCACATG | B2M | 233 |
| R3156 | GTCACAGCCCAAGATAGTTA | B2M | 234 |
| R3157 | TCACAGCCCAAGATAGTTAA | B2M | 235 |
| R3158 | ACTATCTTGGGCTGTGACAA | B2M | 236 |
| R3159 | CCCCACTTAACTATCTTGGG | B2M | 237 |

TABLE C
spacer sequences of gRNAs that target human PD1 in T cells

| Name | Spacer sequence (5′→3′) | Target | SEQ ID NO |
|---|---|---|---|
| R2921 | CCUUCCGCUCACCUCCGCCU | PD1 | 238 |
| R2922 | CCUUCCGCUCACCUCCGCCU | PD1 | 239 |
| R2923 | CGCUCACCUCCGCCUGAGCA | PD1 | 240 |
| R2924 | UCCACUGCUCAGGCGGAGGU | PD1 | 241 |
| R2925 | UAGCACCGCCCAGACGACUG | PD1 | 242 |
| R2926 | AGGCAUGCAGAUCCCACAGG | PD1 | 243 |
| R2927 | CACAGGCGCCCUGGCCAGUC | PD1 | 244 |
| R2928 | UCUGGGCGGUGCUACAACUG | PD1 | 245 |
| R2929 | GCAUGCCUGGAGCAGCCCCA | PD1 | 246 |
| R2930 | UAGCACCGCCCAGACGACUG | PD1 | 247 |
| R2931 | UGGCCGCCAGCCCAGUUGUA | PD1 | 248 |
| R2932 | CUUCCGCUCACCUCCGCCUG | PD1 | 249 |
| R2933 | CAGGGCCUGUCUGGGGAGUC | PD1 | 250 |
| R2934 | UCCCCAGCCCUGCUCGUGGU | PD1 | 251 |
| R2935 | GGUCACCACGAGCAGGGCUG | PD1 | 252 |
| R2936 | UCCCCUUCGGUCACCACGAG | PD1 | 253 |
| R2937 | GAGAAGCUGCAGGUGAAGGU | PD1 | 254 |
| R2938 | ACCUGCAGCUUCUCCAACAC | PD1 | 255 |
| R2939 | UCCAACACAUCGGAGAGCUU | PD1 | 256 |
| R2940 | GCACGAAGCUCUCCGAUGUG | PD1 | 257 |
| R2941 | AGCACGAAGCUCUCCGAUGU | PD1 | 258 |
| R2942 | GUGCUAAACUGGUACCGCAU | PD1 | 259 |
| R2943 | CUGGGGCUCAUGCGGUACCA | PD1 | 260 |
| R2944 | UCCGUCUGGUUGCUGGGGCU | PD1 | 261 |
| R2945 | CCCGAGGACCGCAGCCAGCC | PD1 | 262 |
| R2946 | UGUGACACGGAAGCGGCAGU | PD1 | 263 |
| R2947 | CGUGUCACACAACUGCCCAA | PD1 | 264 |
| R2948 | GGCAGUUGUGUGACACGGAA | PD1 | 265 |
| R2949 | CACAUGAGCGUGGUCAGGGC | PD1 | 266 |
| R2950 | CGCCGGGCCCUGACCACGCU | PD1 | 267 |
| R2951 | GGGGCCAGGGAGAUGGCCCC | PD1 | 268 |
| R2952 | AUCUGCGCCUUGGGGGCCAG | PD1 | 269 |
| R2953 | GAUCUGCGCCUUGGGGGCCA | PD1 | 270 |
| R2954 | CCAGACAGGCCCUGGAACCC | PD1 | 271 |
| R2955 | CCAGCCCUGCUCGUGGUGAC | PD1 | 272 |
| R2956 | UCUCUGGAAGGGCACAAAGG | PD1 | 273 |
| R2957 | GUGCCCUUCCAGAGAGAAGG | PD1 | 274 |
| R2958 | UGCCCUUCCAGAGAGAAGGG | PD1 | 275 |
| R2959 | UGCCCUUCUCUCUGGAAGGG | PD1 | 276 |
| R2960 | CAGAGAGAAGGGCAGAAGUG | PD1 | 277 |
| R2961 | GAACUGGCCGGCUGGCCUGG | PD1 | 278 |
| R2962 | GGAACUGGCCGGCUGGCCUG | PD1 | 279 |
| R2963 | CAAACCCUGGUGGUUGGUGU | PD1 | 280 |
| R2964 | GUGUCGUGGGCGGCCUGCUG | PD1 | 281 |
| R2965 | CCUCGUGCGGCCCGGGAGCA | PD1 | 282 |
| R2966 | UCCCUGCAGAGAAACACACU | PD1 | 283 |
| R2967 | CUCUGCAGGGACAAUAGGAG | PD1 | 284 |
| R2968 | UCUGCAGGGACAAUAGGAGC | PD1 | 285 |
| R2969 | CUCCUCAAAGAAGGAGGACC | PD1 | 286 |
| R2970 | UCCUCAAAGAAGGAGGACCC | PD1 | 287 |
| R2971 | UCUGUGGACUAUGGGGAGCU | PD1 | 288 |
| R2972 | UCUCGCCACUGGAAAUCCAG | PD1 | 289 |
| R2973 | CCAGUGGCGAGAGAAGACCC | PD1 | 290 |
| R2974 | CAGUGGCGAGAGAAGACCCC | PD1 | 291 |
| R2975 | CGCUAGGAAAGACAAUGGUG | PD1 | 292 |
| R2976 | UCUUUCCUAGCGGAAUGGGC | PD1 | 293 |
| R2977 | CCUAGCGGAAUGGGCACCUC | PD1 | 294 |
| R2978 | CUAGCGGAAUGGGCACCUCA | PD1 | 295 |
| R2979 | GCCCCUCUGACCGGCUUCCU | PD1 | 296 |
| R2980 | CUUGGCCACCAGUGUUCUGC | PD1 | 297 |
| R2981 | GCCACCAGUGUUCUGCAGAC | PD1 | 298 |
| R2982 | UGCAGACCCUCCACCAUGAG | PD1 | 299 |
| R2983 | UCCUGAGGAAAUGCGCUGAC | PD1 | 300 |
| R2984 | CCUCAGGAGAAGCAGGCAGG | PD1 | 301 |
| R2985 | CUCAGGAGAAGCAGGCAGGG | PD1 | 302 |
| R2986 | CAGGCCGUCCAGGGGCUGAG | PD1 | 303 |
| R2987 | AGACAUGAGUCCUGUGGUGG | PD1 | 304 |
| R2988 | AGGUCCUGCCAGCACAGAGC | PD1 | 305 |
| R2989 | AGGGAGCUGGACGCAGGCAG | PD1 | 306 |
| R2990 | AGCCCCGGGCCGCAGGCAGC | PD1 | 307 |
| R2991 | AGGCAGGAGGCUCCGGGGCG | PD1 | 308 |
| R2992 | GGGGCUGGUUGGAGAUGGCC | PD1 | 309 |
| R2993 | GAGAUGGCCUUGGAGCAGCC | PD1 | 310 |
| R2994 | GCUGCUCCAAGGCCAUCUCC | PD1 | 311 |
| R2995 | GAGCAGCCAAGGUGCCCCUG | PD1 | 312 |
| R2996 | GGGAUGCCACUGCCAGGGGC | PD1 | 313 |
| R2997 | CGGGAUGCCACUGCCAGGGG | PD1 | 314 |
| R2998 | GGCCCUGCGUCCAGGGCGUU | PD1 | 315 |
| R2999 | UCUGCUCCCUGCAGGCCUAG | PD1 | 316 |
| R3000 | UCUAGGCCUGCAGGGAGCAG | PD1 | 317 |
| R3001 | CCUGAAACUUCUCUAGGCCU | PD1 | 318 |
| R3002 | UGACCUUCCCUGAAACUUCU | PD1 | 319 |
| R3003 | CAGGGAAGGUCAGAAGAGCU | PD1 | 320 |
| R3004 | AGGGAAGGUCAGAAGAGCUC | PD1 | 321 |
| R3005 | CUGCCCUGCCCACCACAGCC | PD1 | 322 |
| R3006 | CCUGCCCUGCCCACCACAGC | PD1 | 323 |
| R3007 | ACACAUGCCCAGGCAGCACC | PD1 | 324 |
| R3008 | CACAUGCCCAGGCAGCACCU | PD1 | 325 |
| R3009 | CCUGCCCCACAAAGGGCCUG | PD1 | 326 |
| R3010 | GUGGGGCAGGGAAGCUGAGG | PD1 | 327 |
| R3011 | UGGGGCAGGGAAGCUGAGGC | PD1 | 328 |
| R3012 | CUGCCUCAGCUUCCCUGCCC | PD1 | 329 |
| R3013 | CAGGCCCAGCCAGCACUCUG | PD1 | 330 |
| R3014 | AGGCCCAGCCAGCACUCUGG | PD1 | 331 |
| R3015 | CACCCCAGCCCCUCACACCA | PD1 | 332 |
| R3016 | GGACCGUAGGAUGUCCCUCU | PD1 | 333 |

TABLE D
spacer sequences of gRNAs targeting human CIITA

| | Spacer sequence | | |
|---|---|---|---|
| Name | (5′→3′), shown as DNA | Target | SEQ ID NO |
| R4503 C2TA_T1.1 | CTACACAATGCGTTGCCTGG | CIITA | 334 |
| R4504 C2TA_T1.2 | GGGCTCTGACAGGTAGGACC | CIITA | 335 |
| R4505 C2TA_T1.3 | TGTAGGAATCCCAGCCAGGC | CIITA | 336 |
| R4506 C2TA_T1.8 | CCTGGCTCCACGCCCTGCTG | CIITA | 337 |
| R4507 C2TA_T1.9 | GGGAAGCTGAGGGCACGAGG | CIITA | 338 |
| R4508 C2TA_T2.1 | ACAGCGATGCTGACCCCCTG | CIITA | 339 |
| R4509 C2TA_T2.2 | TTAACAGCGATGCTGACCCC | CIITA | 340 |
| R4510 C2TA_T2.3 | TATGACCAGATGGACCTGGC | CIITA | 341 |
| R4511 C2TA_T2.4 | GGGCCCCTAGAAGGTGGCTA | CIITA | 342 |
| R4512 C2TA_T2.5 | TAGGGGCCCCAACTCCATGG | CIITA | 343 |
| R4513 C2TA_T2.6 | AGAAGCTCCAGGTAGCCACC | CIITA | 344 |
| R4514 C2TA_T2.7 | TCCAGCCAGGTCCATCTGGT | CIITA | 345 |
| R4515 C2TA_T2.8 | TTCTCCAGCCAGGTCCATCT | CIITA | 346 |
| R5200 | AGCAGGCTGTTGTGTGACAT | CIITA | 1934 |
| R5201 | CATGTCACACAACAGCCTGC | CIITA | 1935 |
| R5202 | TGTGACATGGAAGGTGATGA | CIITA | 1936 |
| R5203 | ATCACCTTCCATGTCACACA | CIITA | 1937 |
| R5204 | GCATAAGCCTCCCTGGTCTC | CIITA | 1938 |
| R5205 | CAGGACTCCCAGCTGGAGGG | CIITA | 1939 |
| R5206 | CTCAGGCCCTCCAGCTGGGA | CIITA | 1940 |
| R5207 | TGCTGGCATCTCCATACTCT | CIITA | 1941 |
| R5208 | TGCCCAACTTCTGCTGGCAT | CIITA | 1942 |
| R5209 | CTGCCCAACTTCTGCTGGCA | CIITA | 1943 |
| R5210 | TCTGCCCAACTTCTGCTGGC | CIITA | 1944 |
| R5211 | TGACTTTTCTGCCCAACTTC | CIITA | 1945 |
| R5212 | CTGACTTTTCTGCCCAACTT | CIITA | 1946 |
| R5213 | TCTGACTTTTCTGCCCAACT | CIITA | 1947 |
| R5214 | CCAGAGGAGCTTCCGGCAGA | CIITA | 1948 |
| R5215 | AGGTCTGCCGGAAGCTCCTC | CIITA | 1949 |
| R5216 | CGGCAGACCTGAAGCACTGG | CIITA | 1950 |
| R5217 | CAGTGCTTCAGGTCTGCCGG | CIITA | 1951 |
| R5218 | AACAGCGCAGGCAGTGGCAG | CIITA | 1952 |
| R5219 | AACCAGGAGCCAGCCTCCGG | CIITA | 1953 |
| R5220 | TCCAGGCGCATCTGGCCGGA | CIITA | 1954 |
| R5221 | CTCCAGGCGCATCTGGCCGG | CIITA | 1955 |
| R5222 | TCTCCAGGCGCATCTGGCCG | CIITA | 1956 |
| R5223 | CTCCAGTTCCTCGTTGAGCT | CIITA | 1957 |
| R5224 | TCCAGTTCCTCGTTGAGCTG | CIITA | 1958 |
| R5225 | AGGCAGCTCAACGAGGAACT | CIITA | 1959 |
| R5226 | CTCGTTGAGCTGCCTGAATC | CIITA | 1960 |
| R5227 | AGCTGCCTGAATCTCCCTGA | CIITA | 1961 |
| R5228 | GTCCCCACCATCTCCACTCT | CIITA | 1962 |
| R5229 | TCCCCACCATCTCCACTCTG | CIITA | 1963 |
| R5230 | CCAGAGCCCATGGGGCAGAG | CIITA | 1964 |
| R5231 | GCCAGAGCCCATGGGGCAGA | CIITA | 1965 |
| R5232 | CAGCCTCAGAGATTTGCCAG | CIITA | 1966 |
| R5233 | GGAGGCCGTGGACAGTGAAT | CIITA | 1967 |
| R5234 | ACTGTCCACGGCCTCCCAAC | CIITA | 1968 |
| R5235 | GCTCCATCAGCCACTGACCT | CIITA | 1969 |
| R5236 | AGGCATGCTGGGCAGGTCAG | CIITA | 1970 |
| R5237 | CTCGGGAGGTCAGGGCAGGT | CIITA | 1971 |
| R5238 | GCTCGGGAGGTCAGGGCAGG | CIITA | 1972 |
| R5239 | GAGACCTCTCCAGCTGCCGG | CIITA | 1973 |
| R5240 | TTGGAGACCTCTCCAGCTGC | CIITA | 1974 |
| R5241 | GAAGCTTGTTGGAGACCTCT | CIITA | 1975 |
| R5242 | GGAAGCTTGTTGGAGACCTC | CIITA | 1976 |
| R5243 | TGGAAGCTTGTTGGAGACCT | CIITA | 1977 |
| R5244 | TACCGCTCACTGCAGGACAC | CIITA | 1978 |
| R5245 | CTGCTGCTCCTCTCCAGCCT | CIITA | 1979 |
| R5246 | CCGCTCCAGGCTCTTGCTGC | CIITA | 1980 |
| R5247 | TGCCCAGTCCGGGGTGGCCA | CIITA | 1981 |
| R5248 | GGCCAGCTGCCGTTCTGCCC | CIITA | 1982 |
| R5249 | GCAGCCAACAGCACCTCAGC | CIITA | 1983 |
| R5250 | GCTGCCAAGGAGCACCGGCG | CIITA | 1984 |
| R5251 | CCCAGCACAGCAATCACTCG | CIITA | 1985 |
| R5252 | GCCCAGCACAGCAATCACTC | CIITA | 1986 |
| R5253 | CTGTGCTGGGCAAAGCTGGT | CIITA | 1987 |
| R5254 | CCCTGACCAGCTTTGCCCAG | CIITA | 1988 |
| R5255 | GGCTGGGGCAGTGAGCCGGG | CIITA | 1989 |
| R5256 | TGGCCGGCTTCCCCAGTACG | CIITA | 1990 |
| R5257 | CCCAGTACGACTTTGTCTTC | CIITA | 1991 |
| R5258 | GTCTTCTCTGTCCCCTGCCA | CIITA | 1992 |
| R5259 | TCTTCTCTGTCCCCTGCCAT | CIITA | 1993 |
| R5260 | TCTGTCCCCTGCCATTGCTT | CIITA | 1994 |
| R5261 | AAGCAATGGCAGGGGACAGA | CIITA | 1995 |
| R5262 | CTTGAACCGTCCGGGGGATG | CIITA | 1996 |
| R5263 | AACCGTCCGGGGGATGCCTA | CIITA | 1997 |
| R5264 | TCCCTGGGCCCACAGCCACT | CIITA | 1998 |
| R5265 | AAGATGTGGCTGAAAACCTC | CIITA | 1999 |
| R5266 | TCAGCCACATCTTGAAGAGA | CIITA | 2000 |
| R5267 | CAGCCACATCTTGAAGAGAC | CIITA | 2001 |
| R5268 | AGCCACATCTTGAAGAGACC | CIITA | 2002 |
| R5269 | AAGAGACCTGACCGCGTTCT | CIITA | 2003 |
| R5270 | TGCTCATCCTAGACGGCTTC | CIITA | 2004 |
| R5271 | CAGCTCCTCGAAGCCGTCTA | CIITA | 2005 |
| R5272 | CGCTTCCAGCTCCTCGAAGC | CIITA | 2006 |
| R5273 | GAGGAGCTGGAAGCGCAAGA | CIITA | 2007 |
| R5274 | CTGCACAGCACGTGCGGACC | CIITA | 2008 |
| R5275 | TGGAAAAGGCCGGCCAGCAG | CIITA | 2009 |
| R5276 | TTCTGGAAAAGGCCGGCCAG | CIITA | 2010 |
| R5277 | TCCAGAAGAAGCTGCTCCGA | CIITA | 2011 |
| R5278 | CCAGAAGAAGCTGCTCCGAG | CIITA | 2012 |
| R5279 | CAGAAGAAGCTGCTCCGAGG | CIITA | 2013 |
| R5280 | CACCCTCCTCCTCACAGCCC | CIITA | 2014 |
| R5281 | CTCAGGCTCTGGACCAGGCG | CIITA | 2015 |
| R5282 | GAGCTGTCCGGCTTCTCCAT | CIITA | 2016 |
| R5283 | AGCTGTCCGGCTTCTCCATG | CIITA | 2017 |
| R5284 | TCCATGGAGCAGGCCCAGGC | CIITA | 2018 |
| R5285 | GAGAGCTCAGGGATGACAGA | CIITA | 2019 |
| R5286 | AGAGCTCAGGGATGACAGAG | CIITA | 2020 |
| R5287 | GTGCTCTGTCATCCCTGAGC | CIITA | 2021 |
| R5288 | TTCTCAGTCACAGCCACAGC | CIITA | 2022 |
| R5289 | TCAGTCACAGCCACAGCCCT | CIITA | 2023 |
| R5290 | GTGCCGGGCAGTGTGCCAGC | CIITA | 2024 |
| R5291 | TGCCGGGCAGTGTGCCAGCT | CIITA | 2025 |
| R5292 | GCGTCCTCCCCAAGCTCCAG | CIITA | 2026 |
| R5293 | GGGAGGACGCCAAGCTGCCC | CIITA | 2027 |
| R5294 | GCCAGCTCTGCCAGGGCCCC | CIITA | 2028 |
| R5295 | ATGTCTGCGGCCCAGCTCCC | CIITA | 2029 |
| R5392 | GATGTCTGCGGCCCAGCTCC | CIITA | 2030 |
| R5393 | CCATCCGCAGACGTGAGGAC | CIITA | 2031 |
| R5394 | GCCATCGCCCAGGTCCTCAC | CIITA | 2032 |
| R5395 | GGCCATCGCCCAGGTCCTCA | CIITA | 2033 |
| R5396 | GACTAAGCCTTTGGCCATCG | CIITA | 2034 |
| R5397 | GTCCAACACCCACCGCGGGC | CIITA | 2035 |
| R5398 | CAGGAGGAAGCTGGGGAAGG | CIITA | 2036 |
| R5399 | CCCAGCTTCCTCCTGCAATG | CIITA | 2037 |
| R5400 | CTCCTGCAATGCTTCCTGGG | CIITA | 2038 |
| R5401 | CTGGGGGCCCTGTGGCTGGC | CIITA | 2039 |
| R5402 | GCCACTCAGAGCCAGCCACA | CIITA | 2040 |
| R5403 | CGCCACTCAGAGCCAGCCAC | CIITA | 2041 |
| R5404 | ATTTCGCCACTCAGAGCCAG | CIITA | 2042 |
| R5405 | TCCTTGATTTCGCCACTCAG | CIITA | 2043 |
| R5406 | GGGTCAATGCTAGGTACTGC | CIITA | 2044 |
| R5407 | CTTGGGGTCAATGCTAGGTA | CIITA | 2045 |
| R5408 | TTCCTTGGGGTCAATGCTAG | CIITA | 2046 |
| R5409 | ACCCCAAGGAAGAAGAGGCC | CIITA | 2047 |
| R5410 | TCATAGGGCCTCTTCTTCCT | CIITA | 2048 |
| R5411 | CTGGCTGGGCTGATCTTCCA | CIITA | 2049 |
| R5412 | TGGCTGGGCTGATCTTCCAG | CIITA | 2050 |
| R5413 | CAGCCTCCCGCCCGCTGCCT | CIITA | 2051 |
| R5414 | CTGTCCACCGAGGCAGCCGC | CIITA | 2052 |
| R5415 | TGCTTCCTGTCCACCGAGGC | CIITA | 2053 |
| R5416 | AGGTACCTCGCAAGCACCTT | CIITA | 2054 |
| R5417 | CGAGGTACCTGAAGCGGCTG | CIITA | 2055 |
| R5418 | CAGCCTCCTCGGCCTCGTGG | CIITA | 2056 |
| R5419 | GGCAGCACGTGGTACAGGAG | CIITA | 2057 |
| R5420 | GCAGCACGTGGTACAGGAGC | CIITA | 2058 |
| R5421 | TCTGGGCACCCGCCTCACGC | CIITA | 2059 |
| R5422 | CTGGGCACCCGCCTCACGCC | CIITA | 2060 |
| R5423 | TGGGCACCCGCCTCACGCCT | CIITA | 2061 |
| R5424 | CCCAGTACATGTGCATCAGG | CIITA | 2062 |
| R5425 | GCCCGCCGCCTCCAAGGCCT | CIITA | 2063 |
| R5426 | GAGGCGGCGGGCCAAGACTT | CIITA | 2064 |
| R5427 | TCCCTGGACCTCCGCAGCAC | CIITA | 2065 |
| R5428 | GCCCCTCTGGATTGGGGAGC | CIITA | 2066 |
| R5429 | CCCCTCTGGATTGGGGAGCC | CIITA | 2067 |
| R5430 | GGGAGCCTCGTGGGACTCAG | CIITA | 2068 |
| R5431 | GTCTCCCCATGCTGCTGCAG | CIITA | 2069 |
| R5432 | TCCTCTGCTGCCTGAAGTAG | CIITA | 2070 |
| R5433 | AGGCAGCAGAGGAGAAGTTC | CIITA | 2071 |
| R5434 | AAAGGCTCGATGGTGAACTT | CIITA | 2072 |
| R5435 | GAAAGGCTCGATGGTGAACT | CIITA | 2073 |
| R5436 | ACCATCGAGCCTTTCAAAGC | CIITA | 2074 |
| R5437 | GCTTTGAAAGGCTCGATGGT | CIITA | 2075 |
| R5438 | AGGGACTTGGCTTTGAAAGG | CIITA | 2076 |
| R5439 | CAAAGCCAAGTCCCTGAAGG | CIITA | 2077 |
| R5440 | AAAGCCAAGTCCCTGAAGGA | CIITA | 2078 |
| R5441 | CACATCCTTCAGGGACTTGG | CIITA | 2079 |
| R5442 | CCAGGTCTTCCACATCCTTC | CIITA | 2080 |
| R5443 | CCCAGGTCTTCCACATCCTT | CIITA | 2081 |
| R5444 | CTCGGAAGACACAGCTGGGG | CIITA | 2082 |
| R5445 | GGTCCCGAACAGCAGGGAGC | CIITA | 2083 |
| R5446 | AGGTCCCGAACAGCAGGGAG | CIITA | 2084 |
| R5447 | TTTAGGTCCCGAACAGCAGG | CIITA | 2085 |
| R5448 | CTTTAGGTCCCGAACAGCAG | CIITA | 2086 |
| R5449 | GGGACCTAAAGAAACTGGAG | CIITA | 2087 |
| R5450 | GGGAAAGCCTGGGGGCCTGA | CIITA | 2088 |
| R5451 | GGGGAAAGCCTGGGGGCCTG | CIITA | 2089 |
| R5452 | CCCCAAACTGGTGCGGATCC | CIITA | 2090 |
| R5453 | CCCAAACTGGTGCGGATCCT | CIITA | 2091 |
| R5454 | TTCTCACTCAGCGCATCCAG | CIITA | 2092 |
| R5455 | AGCTGGGGGAAGGTGGCTGA | CIITA | 2093 |
| R5456 | CCCCAGCTGAAGTCCTTGGA | CIITA | 2094 |
| R5457 | CAAGGACTTCAGCTGGGGGA | CIITA | 2095 |
| R5458 | CCAAGGACTTCAGCTGGGGG | CIITA | 2096 |
| R5459 | AGGGTTTCCAAGGACTTCAG | CIITA | 2097 |
| R5460 | TAGGCACCCAGGTCAGTGAT | CIITA | 2098 |
| R5461 | GTAGGCACCCAGGTCAGTGA | CIITA | 2099 |
| R5462 | GCTCGCTGCATCCCTGCTCA | CIITA | 2100 |
| R5463 | GCCTGAGCAGGGATGCAGCG | CIITA | 2101 |
| R5464 | TACAATAACTGCATCTGCGA | CIITA | 2102 |
| R5465 | GCTCGTGTGCTTCCGGACAT | CIITA | 2103 |
| R5466 | CGGACATGGTGTCCCTCCGG | CIITA | 2104 |
| R5467 | ACGGCTGCCGGGGCCCAGCA | CIITA | 2105 |
| R5468 | GGAGGTGTCCTCATGTGGAG | CIITA | 2106 |
| R5469 | CTGGACACTGAATGGGATGG | CIITA | 2107 |
| R5470 | AGTGTCCAGGAACACCTGCA | CIITA | 2108 |
| R5471 | CAGGTGTTCCTGGACACTGA | CIITA | 2109 |
| R5472 | TTGCAGGTGTTCCTGGACAC | CIITA | 2110 |
| R5473 | ACGGATCAGCCTGAGATGAT | CIITA | 2111 |

TABLE E
spacer sequences of gRNAs targeting mouse PCSK9

| | Spacer sequence | | |
|---|---|---|---|
| Name | (5′ → 3′) | Target | SEQ ID NO |
| R4238 | CCGCUGUUGCCGCCGCUGCU | PCSK9 | 347 |
| R4239 | CCGCCGCUGCUGCUGCUGUU | PCSK9 | 348 |
| R4240 | CUGCUACUGUGCCCCACCGG | PCSK9 | 349 |
| R4241 | AUAAUCUCCAUCCUCGUCCU | PCSK9 | 350 |
| R4242 | UGAAGAGCUGAUGCUCGCCC | PCSK9 | 351 |
| R4243 | GAGCAACGGCGGAAGGUGGC | PCSK9 | 352 |
| R4244 | CUGGCAGCCUCCAGGCCUCC | PCSK9 | 353 |
| R4245 | UGGUGCUGAUGGAGGAGACC | PCSK9 | 354 |
| R4246 | AAUCUGUAGCCUCUGGGUCU | PCSK9 | 355 |
| R4247 | UUCAAUCUGUAGCCUCUGGG | PCSK9 | 356 |
| R4248 | GUUCAAUCUGUAGCCUCUGG | PCSK9 | 357 |
| R4249 | AACAAACUGCCCACCGCCUG | PCSK9 | 358 |
| R4250 | AUGACAUAGCCCCGGCGGGC | PCSK9 | 359 |
| R4251 | UACAUAUCUUUUAUGACCUC | PCSK9 | 360 |
| R4252 | UAUGACCUCUUCCCUGGCUU | PCSK9 | 361 |
| R4253 | AUGACCUCUUCCCUGGCUUC | PCSK9 | 362 |
| R4254 | UGACCUCUUCCCUGGCUUCU | PCSK9 | 363 |
| R4255 | ACCAAGAAGCCAGGGAAGAG | PCSK9 | 364 |
| R4256 | CCUGGCUUCUUGGUGAAGAU | PCSK9 | 365 |
| R4257 | UUGGUGAAGAUGAGCAGUGA | PCSK9 | 366 |
| R4258 | GUGAAGAUGAGCAGUGACCU | PCSK9 | 367 |
| R4259 | CCCCAUGUGGAGUACAUUGA | PCSK9 | 368 |
| R4260 | CUCAAUGUACUCCACAUGGG | PCSK9 | 369 |
| R4261 | AGGAAGACUCCUUUGUCUUC | PCSK9 | 370 |
| R4262 | GUCUUCGCCCAGAGCAUCCC | PCSK9 | 371 |
| R4263 | UCUUCGCCCAGAGCAUCCCA | PCSK9 | 372 |
| R4264 | GCCCAGAGCAUCCCAUGGAA | PCSK9 | 373 |
| R4265 | CAUGGGAUGCUCUGGGCGAA | PCSK9 | 374 |
| R4266 | GCUCCAGGUUCCAUGGGAUG | PCSK9 | 375 |
| R4267 | UCCCAGCAUGGCACCAGACA | PCSK9 | 376 |
| R4268 | CUCUGUCUGGUGCCAUGCUG | PCSK9 | 377 |
| R4269 | GAUACCAGCAUCCAGGGUGC | PCSK9 | 378 |
| R4270 | AGGGCAGGGUCACCAUCACC | PCSK9 | 379 |
| R4271 | AAGUCGGUGAUGGUGACCCU | PCSK9 | 380 |
| R4272 | AACAGCGUGCCGGAGGAGGA | PCSK9 | 381 |
| R4273 | GCCACACCAGCAUCCCGGCC | PCSK9 | 382 |
| R4274 | AGCACACGCAGGCUGUGCAG | PCSK9 | 383 |
| R4275 | ACAGUUGAGCACACGCAGGC | PCSK9 | 384 |
| R4276 | CCUUGACAGUUGAGCACACG | PCSK9 | 385 |
| R4277 | GCUGACUCUUCCGAAUAAAC | PCSK9 | 386 |
| R4278 | AUUCGGAAGAGUCAGCUAAU | PCSK9 | 387 |
| R4279 | UUCGGAAGAGUCAGCUAAUC | PCSK9 | 388 |
| R4280 | GGAAGAGUCAGCUAAUCCAG | PCSK9 | 389 |
| R4281 | UGCUGCCCCUGGCCGGUGGG | PCSK9 | 390 |
| R4282 | AGGAUGCGGCUAUACCCACC | PCSK9 | 391 |
| R4283 | CCAGCUGCUGCAACCAGCAC | PCSK9 | 392 |
| R4284 | CAGCAGCUGGGAACUUCCGG | PCSK9 | 393 |
| R4285 | CGGGACGACGCCUGCCUCUA | PCSK9 | 394 |
| R4286 | GUGGCCCCGACUGUGAUGAC | PCSK9 | 395 |
| R4287 | CCUUGGGGACUUUGGGGACU | PCSK9 | 396 |
| R4288 | GUCCCCAAAGUCCCCAAGGU | PCSK9 | 397 |
| R4289 | GGGACUUUGGGGACUAAUUU | PCSK9 | 398 |
| R4290 | GGGGACUAAUUUUGGACGCU | PCSK9 | 399 |
| R4291 | GGGACUAAUUUUGGACGCUG | PCSK9 | 400 |
| R4292 | UGGACGCUGUGUGGAUCUCU | PCSK9 | 401 |
| R4293 | GGACGCUGUGUGGAUCUCUU | PCSK9 | 402 |
| R4294 | GACGCUGUGUGGAUCUCUUU | PCSK9 | 403 |
| R4295 | CCGGGGGCAAAGAGAUCCAC | PCSK9 | 404 |
| R4296 | GCCCCCGGGAAGGACAUCAU | PCSK9 | 405 |
| R4297 | CCCCCGGGAAGGACAUCAUC | PCSK9 | 406 |
| R4298 | AUGUCACAGAGUGGGACCUC | PCSK9 | 407 |
| R4299 | UGGCUCGGAUGCUGAGCCGG | PCSK9 | 408 |
| R4300 | CCCUGGCCGAGCUGCGGCAG | PCSK9 | 409 |
| R4301 | GUAGAGAAGUGGAUCAGCCU | PCSK9 | 410 |
| R4302 | GGUAGAGAAGUGGAUCAGCC | PCSK9 | 411 |
| R4303 | UCUACCAAAGACGUCAUCAA | PCSK9 | 412 |
| R4304 | AUGACGUCUUUGGUAGAGAA | PCSK9 | 413 |
| R4305 | CCUGAGGACCAGCAGGUGCU | PCSK9 | 414 |
| R4306 | GGGGUCAGCACCUGCUGGUC | PCSK9 | 415 |
| R4307 | GAGUGGGCCCCGAGUGUGCC | PCSK9 | 416 |
| R4308 | UGGGGCACAGCGGGCUGUAG | PCSK9 | 417 |
| R4309 | UCCAGGAGCGGGAGGCGUCG | PCSK9 | 418 |
| R4310 | CAGACCUGCUGGCCUCCUAU | PCSK9 | 419 |
| R4311 | AGGGCCUUGCAGACCUGCUG | PCSK9 | 420 |
| R4312 | GGGGGUGAGGGUGUCUAUGC | PCSK9 | 421 |
| R4313 | GGGGUGAGGGUGUCUAUGCC | PCSK9 | 422 |
| R4314 | GCACGGGGAACCAGGCAGCA | PCSK9 | 423 |
| R4315 | CCCGUGCCAACUGCAGCAUC | PCSK9 | 424 |
| R4316 | UGGAUGCUGCAGUUGGCACG | PCSK9 | 425 |
| R4317 | UGGUGGCAGUGGACAUGGGU | PCSK9 | 426 |
| R4318 | CACUUCCCAAUGGAAGCUGC | PCSK9 | 427 |
| R4319 | CAUUGGGAAGUGGAAGACCU | PCSK9 | 428 |
| R4320 | GGAAGUGGAAGACCUUAGUG | PCSK9 | 429 |
| R4321 | GUGUCCGGAGGCAGCCUGCG | PCSK9 | 430 |
| R4322 | GCCACCAGGCGGCCAGUGUC | PCSK9 | 431 |
| R4323 | CUGCUGCCAUGCCCCAGGGC | PCSK9 | 432 |
| R4324 | CAGCCCUGGGGCAUGGCAGC | PCSK9 | 433 |
| R4325 | CAUUCCAGCCCUGGGGCAUG | PCSK9 | 434 |
| R4326 | GCAUUCCAGCCCUGGGGCAU | PCSK9 | 435 |
| R4327 | UGCAUUCCAGCCCUGGGGCA | PCSK9 | 436 |
| R4328 | AUUUUGCAUUCCAGCCCUGG | PCSK9 | 437 |
| R4329 | CAUCCAGUCAGGGUCCAUCC | PCSK9 | 438 |
| R4330 | UCCACGCUGUAGGCUCCCAG | PCSK9 | 439 |
| R4331 | CCACACACAGGUUGUCCACG | PCSK9 | 440 |
| R4332 | UCCACUGGUCCUGUCUGCUC | PCSK9 | 441 |
| R4333 | CUGAAGGCCGGCUCCGGCAG | PCSK9 | 442 |

TABLE F
spacer sequences of gRNAs targets Bak1 in CHO
cells

| | Spacer sequence | SEQ |
|---|---|---|
| | (5′ → 3′), | ID |
| Name | shown as DNA | NO |
| R2452_Bak1_CasPhi_1 | GAAGCTATGTTTTCCATCTC | 443 |
| R2453_Bak1_CasPhi_2 | GCAGGGGCAGCCGCCCCCTG | 444 |
| R2454_Bak1_CasPhi_3 | CTCCTAGAACCCAACAGGTA | 445 |
| R2455_Bak1_CasPhi_4 | GAAAGACCTCCTCTGTGTCC | 446 |
| R2456_Bak1_CasPhi_5 | TCCATCTCGGGGTTGGCAGG | 447 |
| R2457_Bak1_CasPhi_6 | TTCCTGATGGTGGAGATGGA | 448 |
| R2849 Bakl nsd_sg1 | CTGACTCCCAGCTCTGACCC | 449 |
| R2850_Bak1_nsd_sg2 | TGGGGTCAGAGCTGGGAGTC | 450 |
| R2851_Bak1_nsd_sg3 | GAAAGACCTCCTCTGTGTCC | 451 |
| R2852_Bak1_nsd_sg4 | CGAAGCTATGTTTTCCATCT | 452 |
| R2853_Bak1_nsd_sg5 | GAAGCTATGTTTTCCATCTC | 453 |
| R2854_Bak1_nsd_sg6 | TCCATCTCCACCATCAGGAA | 454 |
| R2855_Bak1_nsd_sg7 | CCATCTCCACCATCAGGAAC | 455 |
| R2856_Bak1_nsd_sg8 | CTGATGGTGGAGATGGAAAA | 456 |
| R2857 Bakl nsd_sg9 | CATCTCCACCATCAGGAACA | 457 |
| R2858_Bak1_nsd_sg10 | TTCCTGATGGTGGAGATGGA | 458 |
| R2859_Bak1_nsd_sg11 | GCAGGGGCAGCCGCCCCCTG | 459 |
| R2860_Bak1_nsd_sg12 | TCCATCTCGGGGTTGGCAGG | 460 |
| R2861_Bak1_nsd_sg13 | TAGGAGCAAATTGTCCATCT | 461 |
| R2862_Bak1_nsd sg14 | GGTTCTAGGAGCAAATTGTC | 462 |
| R2863_Bak1_nsd_sg15 | GCTCCTAGAACCCAACAGGT | 463 |
| R2864_Bak1_nsd_sg16 | CTCCTAGAACCCAACAGGTA | 464 |
| R3977_Bak1_exon1_sg1 | TCCAGACGCCATCTTTCAGG | 465 |
| R3978_Bak1_exon1_sg2 | TGGTAAGAGTCCTCCTGCCC | 466 |
| R3979_Bak1_exon3_sg1 | TTACAGCATCTTGGGTCAGG | 467 |
| R3980_Bak1_exon3_sg2 | GGTCAGGTGGGCCGGCAGCT | 468 |
| R3981_Bak1_exon3_sg3 | CTATCATTGGAGATGACATT | 469 |
| R3982_Bak1_exon3_sg4 | GAGATGACATTAACCGGAGA | 470 |
| R3983_Bak1_exon3_sg5 | TGGAACTCTGTGTCGTATCT | 471 |
| R3984_Bak1_exon3_sg6 | CAGAATTTACTGGAGCAGCT | 472 |
| R3985_Bak1_exon3_sg7 | ACTGGAGCAGCTGCAGCCCA | 473 |
| R3986_Bak1_exon3_sg8 | CCAGCTGTGGGCTGCAGCTG | 474 |
| R3987_Bak1_exon3_sg9 | GTAGGCATTCCCAGCTGTGG | 475 |
| R3988_Bak1_exon3_sg10 | GTGAAGAGTTCGTAGGCATT | 476 |
| R3989_Bak1_exon3_sg11 | ACCAAGATTGCCTCCAGGTA | 477 |
| R3990_Bak1_exon3_sg12 | CCTCCAGGTACCCACCACCA | 478 |

TABLE G
spacer sequences of gRNAs targeting Bax in CHO
cells

| | Spacer sequence | SEQ |
|---|---|---|
| | (5′ → 3′), | ID |
| Name | shown as DNA | NO |
| R2458_Bax_CasPhi_1 | CTAATGTGGATACTAACTCC | 479 |
| R2459_Bax_CasPhi_2 | TTCCGTGTGGCAGCTGACAT | 480 |
| R2460_Bax_CasPhi_3 | CTGATGGCAACTTCAACTGG | 481 |
| R2461_Bax_CasPhi_4 | TACTTTGCTAGCAAACTGGT | 482 |
| R2462_Bax_CasPhi_5 | AGCACCAGTTTGCTAGCAAA | 483 |
| R2463_Bax_CasPhi_6 | AACTGGGGCCGGGTTGTTGC | 484 |
| R2865_Bax_nsd sg1 | TTCTCTTTCCTGTAGGATGA | 485 |
| R2866_Bax_nsd_sg2 | TCTTTCCTGTAGGATGATTG | 486 |
| R2867_Bax_nsd_sg3 | CCTGTAGGATGATTGCTAAT | 487 |
| R2868_Bax_nsd_sg4 | CTGTAGGATGATTGCTAATG | 488 |
| R2869_Bax_nsd_sg5 | CTAATGTGGATACTAACTCC | 489 |
| R2870_Bax_nsd_sg6 | TTCCGTGTGGCAGCTGACAT | 490 |
| R2871_Bax_nsd_sg7 | CGTGTGGCAGCTGACATGTT | 491 |
| R2872_Bax_nsd_sg8 | CCATCAGCAAACATGTCAGC | 492 |
| R2873_Bax_nsd_sg9 | AAGTTGCCATCAGCAAACAT | 493 |
| R2874_Bax_nsd_sg10 | GCTGATGGCAACTTCAACTG | 494 |
| R2875_Bax_nsd_sg11 | CTGATGGCAACTTCAACTGG | 495 |
| R2876_Bax_nsd_sg12 | AACTGGGGCCGGGTTGTTGC | 496 |
| R2877_Bax_nsd_sg13 | TTGCCCTTTTCTACTTTGCT | 497 |
| R2878_Bax_nsd sg14 | CCCTTTTCTACTTTGCTAGC | 498 |
| R2879_Bax_nsd sg15 | CTAGCAAAGTAGAAAAGGGC | 499 |
| R2880_Bax_nsd sg16 | GCTAGCAAAGTAGAAAAGGG | 500 |
| R2881_Bax_nsd_sg17 | TCTACTTTGCTAGCAAACTG | 501 |
| R2882_Bax_nsd_sg18 | CTACTTTGCTAGCAAACTGG | 502 |
| R2883_Bax_nsd_sg19 | TACTTTGCTAGCAAACTGGT | 503 |
| R2884_Bax_nsd_sg20 | GCTAGCAAACTGGTGCTCAA | 504 |
| R2885_Bax_nsd_sg21 | CTAGCAAACTGGTGCTCAAG | 505 |
| R2886_Bax_nsd_sg22 | AGCACCAGTTTGCTAGCAAA | 506 |

TABLE H
spacer sequences of gRNAs targeting Fut8 in CHO
cells

| | Spacer sequence | SEQ |
|---|---|---|
| | (5′ → 3′), | ID |
| Name | shown as DNA | NO |
| R2464_Fut8_CasPhi_1 | CCACTTTGTCAGTGCGTCTG | 507 |
| R2465_Fut8 casPhi 2 | CTCAATGGGATGGAAGGCTG | 508 |
| R2466_Fut8_CasPhi_3 | AGGAATACATGGTACACGTT | 509 |
| R2467_Fut8_CasPhi_4 | AAGAACATTTTCAGCTTCTC | 510 |
| R2468_Fut8_CasPhi_5 | ATCCACTTTCATTCTGCGTT | 511 |
| R2469_Fut8_CasPhi_6 | TTTGTTAAAGGAGGCAAAGA | 512 |
| R2887_Fut8 nsd sg1 | TCCCCAGAGTCCATGTCAGA | 513 |
| R2888_Fut8 nsd_sg2 | TCAGTGCGTCTGACATGGAC | 514 |
| R2889_Fut8_nsd_sg3 | GTCAGTGCGTCTGACATGGA | 515 |
| R2890_Fut8 nsd_sg4 | CCACTTTGTCAGTGCGTCTG | 516 |
| R2891_Fut8_nsd_sg5 | TGTTCCCACTTTGTCAGTGC | 517 |
| R2892_Fut8_nsd_sg6 | CTCAATGGGATGGAAGGCTG | 518 |
| R2893_Fut8 nsd_sg7 | CATCCCATTGAGGAATACAT | 519 |
| R2894_Fut8_nsd_sg8 | AGGAATACATGGTACACGTT | 520 |
| R2895_Fut8_nsd_sg9 | AACGTGTACCATGTATTCCT | 521 |
| R2896_Fut8 nsd sg10 | TTCAACGTGTACCATGTATT | 522 |
| R2897_Fut8 nsd_sg11 | AAGAACATTTTCAGCTTCTC | 523 |
| R2898_Fut8_nsd_sg12 | GAGAAGCTGAAAATGTTCTT | 524 |
| R2899_Fut8 nsd_sg13 | TCAGCTTCTCGAACGCAGAA | 525 |
| R2900_Fut8_nsd_sg14 | CAGCTTCTCGAACGCAGAAT | 526 |
| R2901_Fut8_nsd_sg15 | TGCGTTCGAGAAGCTGAAAA | 527 |
| R2902_Fut8_nsd_sg16 | AGCTTCTCGAACGCAGAATG | 528 |
| R2903_Fut8 nsd sg17 | ATTCTGCGTTCGAGAAGCTG | 529 |
| R2904_Fut8_nsd_sg18 | CATTCTGCGTTCGAGAAGCT | 530 |
| R2905_Fut8_nsd_sg19 | TCGAACGCAGAATGAAAGTG | 531 |
| R2906_Fut8_nsd_sg20 | ATCCACTTTCATTCTGCGTT | 532 |
| R2907_Fut8 nsd_sg21 | TATCCACTTTCATTCTGCGT | 533 |
| R2908_Fut8 nsd sg22 | TTATCCACTTTCATTCTGCG | 534 |
| R2909_Fut8 nsd_sg23 | TTTATCCACTTTCATTCTGC | 535 |
| R2910_Fut8_nsd_sg24 | TTTTATCCACTTTCATTCTG | 536 |
| R2911_Fut8_nsd_sg25 | AACAAAGAAGGGTCATCAGT | 537 |
| R2912_Fut8 nsd_sg26 | CCTCCTTTAACAAAGAAGGG | 538 |
| R2913_Fut8_nsd_sg27 | GCCTCCTTTAACAAAGAAGG | 539 |
| R2914_Fut8 nsd_sg28 | TTTGTTAAAGGAGGCAAAGA | 540 |
| R2915_Fut8_nsd_sg29 | GTTAAAGGAGGCAAAGACAA | 541 |
| R2916_Fut8 nsd_sg30 | TTAAAGGAGGCAAAGACAAA | 542 |
| R2917_Fut8 nsd_sg31 | TCTTTGCCTCCTTTAACAAA | 543 |
| R2918_Fut8_nsd_sg32 | GTCTTTGCCTCCTTTAACAA | 544 |
| R2919_Fut8 nsd_sg33 | GTCTAACTTACTTTGTCTTT | 545 |
| R2920_Fut8_nsd_sg34 | TTGGTCTAACTTACTTTGTC | 546 |

TABLE I
CasΦ.12 gRNAs targeting human TRAC in T cells

| Name | Repeat + spacer RNA Sequence (5′ → 3′), shown as DNA | SEQ ID NO |
|---|---|---|
| R3040_ | CTTTCAAGACTAATAGATTGCTCCTTACGAGGAGAC | 547 |
| CasPhi12 | TGGATATCTGTGGGACAAGA | |
| R3041_ | CTTTCAAGACTAATAGATTGCTCCTTACGAGGAGAC | 548 |
| CasPhi12 | TCCCACAGATATCCAGAACC | |
| R3042_ | CTTTCAAGACTAATAGATTGCTCCTTACGAGGAGAC | 549 |
| CasPhi12 | GAGTCTCTCAGCTGGTACAC | |
| R3043_ | CTTTCAAGACTAATAGATTGCTCCTTACGAGGAGAC | 550 |
| CasPhi12 | AGAGTCTCTCAGCTGGTACA | |
| R3044_ | CTTTCAAGACTAATAGATTGCTCCTTACGAGGAGAC | 551 |
| CasPhi12 | TCACTGGATTTAGAGTCTCT | |
| R3045_ | CTTTCAAGACTAATAGATTGCTCCTTACGAGGAGAC | 552 |
| CasPhi12 | AGAATCAAAATCGGTGAATA | |
| R3046_ | CTTTCAAGACTAATAGATTGCTCCTTACGAGGAGAC | 553 |
| CasPhi12 | GAGAATCAAAATCGGTGAAT | |
| R3047_ | CTTTCAAGACTAATAGATTGCTCCTTACGAGGAGAC | 554 |
| CasPhi12 | ACCGATTTTGATTCTCAAAC | |
| R3048_ | CTTTCAAGACTAATAGATTGCTCCTTACGAGGAGAC | 555 |
| CasPhi12 | TTTGAGAATCAAAATCGGTG | |
| R3049_ | CTTTCAAGACTAATAGATTGCTCCTTACGAGGAGAC | 556 |
| CasPhi12 | GTTTGAGAATCAAAATCGGT | |
| R3050_ | CTTTCAAGACTAATAGATTGCTCCTTACGAGGAGAC | 557 |
| CasPhi12 | TGATTCTCAAACAAATGTGT | |
| R3051_ | CTTTCAAGACTAATAGATTGCTCCTTACGAGGAGAC | 558 |
| CasPhi12 | GATTCTCAAACAAATGTGTC | |
| R3052_ | CTTTCAAGACTAATAGATTGCTCCTTACGAGGAGAC | 559 |
| CasPhi12 | ATTCTCAAACAAATGTGTCA | |
| R3053__ | CTTTCAAGACTAATAGATTGCTCCTTACGAGGAGAC | 560 |
| CasPhi12 | TGACACATTTGTTTGAGAAT | |
| R3054_ | CTTTCAAGACTAATAGATTGCTCCTTACGAGGAGAC | 561 |
| CasPhi12 | TCAAACAAATGTGTCACAAA | |
| R3055_ | CTTTCAAGACTAATAGATTGCTCCTTACGAGGAGAC | 562 |
| CasPhi12 | GTGACACATTTGTTTGAGAA | |
| R3056_ | CTTTCAAGACTAATAGATTGCTCCTTACGAGGAGAC | 563 |
| CasPhi12 | CTTTGTGACACATTTGTTTG | |
| R3057_ | CTTTCAAGACTAATAGATTGCTCCTTACGAGGAGAC | 564 |
| CasPhi12 | TGATGTGTATATCACAGACA | |
| R3058_ | CTTTCAAGACTAATAGATTGCTCCTTACGAGGAGAC | 565 |
| CasPhi12 | TCTGTGATATACACATCAGA | |
| R3059_ | CTTTCAAGACTAATAGATTGCTCCTTACGAGGAGAC | 566 |
| CasPhi12 | GTCTGTGATATACACATCAG | |
| R3060_ | CTTTCAAGACTAATAGATTGCTCCTTACGAGGAGAC | 567 |
| CasPhi12 | TGTCTGTGATATACACATCA | |
| R3061_ | CTTTCAAGACTAATAGATTGCTCCTTACGAGGAGAC | 568 |
| CasPhi12 | AAGTCCATAGACCTCATGTC | |
| R3062_ | CTTTCAAGACTAATAGATTGCTCCTTACGAGGAGAC | 569 |
| CasPhi12 | CTCTTGAAGTCCATAGACCT | |
| R3063_ | CTTTCAAGACTAATAGATTGCTCCTTACGAGGAGAC | 570 |
| CasPhi12 | AAGAGCAACAGTGCTGTGGC | |
| R3064_ | CTTTCAAGACTAATAGATTGCTCCTTACGAGGAGAC | 571 |
| CasPhi12 | CTCCAGGCCACAGCACTGTT | |
| R3065_ | CTTTCAAGACTAATAGATTGCTCCTTACGAGGAGAC | 572 |
| CasPhi12 | TTGCTCCAGGCCACAGCACT | |
| R3066_ | CTTTCAAGACTAATAGATTGCTCCTTACGAGGAGAC | 573 |
| CasPhi12 | GTTGCTCCAGGCCACAGCAC | |
| R3067_ | CTTTCAAGACTAATAGATTGCTCCTTACGAGGAGAC | 574 |
| CasPhi12 | CACATGCAAAGTCAGATTTG | |
| R3068_ | CTTTCAAGACTAATAGATTGCTCCTTACGAGGAGAC | 575 |
| CasPhi12 | GCACATGCAAAGTCAGATTT | |
| R3069_ | CTTTCAAGACTAATAGATTGCTCCTTACGAGGAGAC | 576 |
| CasPhi12 | GCATGTGCAAACGCCTTCAA | |
| R3070_ | CTTTCAAGACTAATAGATTGCTCCTTACGAGGAGAC | 577 |
| CasPhi12 | AAGGCGTTTGCACATGCAAA | |
| R3071_ | CTTTCAAGACTAATAGATTGCTCCTTACGAGGAGAC | 578 |
| CasPhi12 | CATGTGCAAACGCCTTCAAC | |
| R3072_ | CTTTCAAGACTAATAGATTGCTCCTTACGAGGAGAC | 579 |
| CasPhi12 | TTGAAGGCGTTTGCACATGC | |
| R3073_ | CTTTCAAGACTAATAGATTGCTCCTTACGAGGAGAC | 580 |
| CasPhi12 | AACAACAGCATTATTCCAGA | |
| R3074_ | CTTTCAAGACTAATAGATTGCTCCTTACGAGGAGAC | 581 |
| CasPhi12 | TGGAATAATGCTGTTGTTGA | |
| R3075_ | CTTTCAAGACTAATAGATTGCTCCTTACGAGGAGAC | 582 |
| CasPhi12 | TTCCAGAAGACACCTTCTTC | |
| R3076_ | CTTTCAAGACTAATAGATTGCTCCTTACGAGGAGAC | 583 |
| CasPhi12 | CAGAAGACACCTTCTTCCCC | |
| R3077_ | CTTTCAAGACTAATAGATTGCTCCTTACGAGGAGAC | 584 |
| CasPhi12 | CCTGGGCTGGGGAAGAAGGT | |
| R3078_ | CTTTCAAGACTAATAGATTGCTCCTTACGAGGAGAC | 585 |
| CasPhi12 | TTCCCCAGCCCAGGTAAGGG | |
| R3079_ | CTTTCAAGACTAATAGATTGCTCCTTACGAGGAGAC | 586 |
| CasPhi12 | CCCAGCCCAGGTAAGGGCAG | |
| R3080_ | CTTTCAAGACTAATAGATTGCTCCTTACGAGGAGAC | 587 |
| CasPhi12 | TAAAAGGAAAAACAGACATT | |
| R3081_ | CTTTCAAGACTAATAGATTGCTCCTTACGAGGAGAC | 588 |
| CasPhi12 | CTAAAAGGAAAAACAGACAT | |
| R3082_ | CTTTCAAGACTAATAGATTGCTCCTTACGAGGAGAC | 589 |
| CasPhi12 | TTCCTTTTAGAAAGTTCCTG | |
| R3083_ | CTTTCAAGACTAATAGATTGCTCCTTACGAGGAGAC | 590 |
| CasPhi12 | TCCTTTTAGAAAGTTCCTGT | |
| R3084_ | CTTTCAAGACTAATAGATTGCTCCTTACGAGGAGAC | 591 |
| CasPhi12 | CCTTTTAGAAAGTTCCTGTG | |
| R3085_ | CTTTCAAGACTAATAGATTGCTCCTTACGAGGAGAC | 592 |
| CasPhi12 | CTTTTAGAAAGTTCCTGTGA | |
| R3086_ | CTTTCAAGACTAATAGATTGCTCCTTACGAGGAGAC | 593 |
| CasPhi12 | TAGAAAGTTCCTGTGATGTC | |
| R3136_ | CTTTCAAGACTAATAGATTGCTCCTTACGAGGAGAC | 594 |
| CasPhi12 | AGAAAGTTCCTGTGATGTCA | |
| R3137_ | CTTTCAAGACTAATAGATTGCTCCTTACGAGGAGAC | 595 |
| CasPhi12 | GAAAGTTCCTGTGATGTCAA | |
| R3138_ | CTTTCAAGACTAATAGATTGCTCCTTACGAGGAGAC | 596 |
| CasPhi12 | ACATCACAGGAACTTTCTAA | |
| R3139_ | CTTTCAAGACTAATAGATTGCTCCTTACGAGGAGAC | 597 |
| CasPhi12 | CTGTGATGTCAAGCTGGTCG | |
| R3140_ | CTTTCAAGACTAATAGATTGCTCCTTACGAGGAGAC | 598 |
| CasPhi12 | TCGACCAGCTTGACATCACA | |
| R3141_ | CTTTCAAGACTAATAGATTGCTCCTTACGAGGAGAC | 599 |
| CasPhi12 | CTCGACCAGCTTGACATCAC | |
| R3142_ | CTTTCAAGACTAATAGATTGCTCCTTACGAGGAGAC | 600 |
| CasPhi12 | TCTCGACCAGCTTGACATCA | |
| R3143_ | CTTTCAAGACTAATAGATTGCTCCTTACGAGGAGAC | 601 |
| CasPhi12 | AAAGCTTTTCTCGACCAGCT | |
| R3144_ | CTTTCAAGACTAATAGATTGCTCCTTACGAGGAGAC | 602 |
| CasPhi12 | CAAAGCTTTTCTCGACCAGC | |
| R3145_ | CTTTCAAGACTAATAGATTGCTCCTTACGAGGAGAC | 603 |
| CasPhi12 | CCTGTTTCAAAGCTTTTCTC | |
| R3146_ | CTTTCAAGACTAATAGATTGCTCCTTACGAGGAGAC | 604 |
| CasPhi12 | GAAACAGGTAAGACAGGGGT | |
| R3147_ | CTTTCAAGACTAATAGATTGCTCCTTACGAGGAGAC | 605 |
| CasPhi12 | AAACAGGTAAGACAGGGGTC | |

TABLE J
CasΦ.32 gRNAs targeting human TRAC in T cells

| Name | Repeat + spacer RNA Sequence (5′ → 3′), shown as DNA | SEQ ID NO |
|---|---|---|
| R3040_ | GCTGGGGACCGATCCTGATTGCTCGCTGCGGCGAGA | 606 |
| CasPhi32 | CTGGATATCTGTGGGACAAGA | |
| R3041_ | GCTGGGGACCGATCCTGATTGCTCGCTGCGGCGAGA | 607 |
| CasPhi32 | CTCCCACAGATATCCAGAACC | |
| R3042_ | GCTGGGGACCGATCCTGATTGCTCGCTGCGGCGAGA | 608 |
| CasPhi32 | CGAGTCTCTCAGCTGGTACAC | |
| R3043_ | GCTGGGGACCGATCCTGATTGCTCGCTGCGGCGAGA | 609 |
| CasPhi32 | CAGAGTCTCTCAGCTGGTACA | |
| R3044_ | GCTGGGGACCGATCCTGATTGCTCGCTGCGGCGAGA | 610 |
| CasPhi32 | CTCACTGGATTTAGAGTCTCT | |
| R3045_ | GCTGGGGACCGATCCTGATTGCTCGCTGCGGCGAGA | 611 |
| CasPhi32 | CAGAATCAAAATCGGTGAATA | |
| R3046_ | GCTGGGGACCGATCCTGATTGCTCGCTGCGGCGAGA | 612 |
| CasPhi32 | CGAGAATCAAAATCGGTGAAT | |
| R3047_ | GCTGGGGACCGATCCTGATTGCTCGCTGCGGCGAGA | 613 |
| CasPhi32 | CACCGATTTTGATTCTCAAAC | |
| R3048_ | GCTGGGGACCGATCCTGATTGCTCGCTGCGGCGAGA | 614 |
| CasPhi32 | CTTTGAGAATCAAAATCGGTG | |
| R3049_ | GCTGGGGACCGATCCTGATTGCTCGCTGCGGCGAGA | 615 |
| CasPhi32 | CGTTTGAGAATCAAAATCGGT | |
| R3050_ | GCTGGGGACCGATCCTGATTGCTCGCTGCGGCGAGA | 616 |
| CasPhi32 | CTGATTCTCAAACAAATGTGT | |
| R3051_ | GCTGGGGACCGATCCTGATTGCTCGCTGCGGCGAGA | 617 |
| CasPhi32 | CGATTCTCAAACAAATGTGTC | |
| R3052_ | GCTGGGGACCGATCCTGATTGCTCGCTGCGGCGAGA | 618 |
| CasPhi32 | CATTCTCAAACAAATGTGTCA | |
| R3053_ | GCTGGGGACCGATCCTGATTGCTCGCTGCGGCGAGA | 619 |
| CasPhi32 | CTGACACATTTGTTTGAGAAT | |
| R3054_ | GCTGGGGACCGATCCTGATTGCTCGCTGCGGCGAGA | 620 |
| CasPhi32 | CTCAAACAAATGTGTCACAAA | |
| R3055_ | GCTGGGGACCGATCCTGATTGCTCGCTGCGGCGAGA | 621 |
| CasPhi32 | CGTGACACATTTGTTTGAGAA | |
| R3056_ | GCTGGGGACCGATCCTGATTGCTCGCTGCGGCGAGA | 622 |
| CasPhi32 | CCTTTGTGACACATTTGTTTG | |
| R3057_ | GCTGGGGACCGATCCTGATTGCTCGCTGCGGCGAGA | 623 |
| CasPhi32 | CTGATGTGTATATCACAGACA | |
| R3058_ | GCTGGGGACCGATCCTGATTGCTCGCTGCGGCGAGA | 624 |
| CasPhi32 | CTCTGTGATATACACATCAGA | |
| R3059_ | GCTGGGGACCGATCCTGATTGCTCGCTGCGGCGAGA | 625 |
| CasPhi32 | CGTCTGTGATATACACATCAG | |
| R3060_ | GCTGGGGACCGATCCTGATTGCTCGCTGCGGCGAGA | 626 |
| CasPhi32 | CTGTCTGTGATATACACATCA | |
| R3061_ | GCTGGGGACCGATCCTGATTGCTCGCTGCGGCGAGA | 627 |
| CasPhi32 | CAAGTCCATAGACCTCATGTC | |
| R3062_ | GCTGGGGACCGATCCTGATTGCTCGCTGCGGCGAGA | 628 |
| CasPhi32 | CCTCTTGAAGTCCATAGACCT | |
| R3063_ | GCTGGGGACCGATCCTGATTGCTCGCTGCGGCGAGA | 629 |
| CasPhi32 | CAAGAGCAACAGTGCTGTGGC | |
| R3064_ | GCTGGGGACCGATCCTGATTGCTCGCTGCGGCGAGA | 630 |
| CasPhi32 | CCTCCAGGCCACAGCACTGTT | |
| R3065_ | GCTGGGGACCGATCCTGATTGCTCGCTGCGGCGAGA | 631 |
| CasPhi32 | CTTGCTCCAGGCCACAGCACT | |
| R3066_ | GCTGGGGACCGATCCTGATTGCTCGCTGCGGCGAGA | 632 |
| CasPhi32 | CGTTGCTCCAGGCCACAGCAC | |
| R3067_ | GCTGGGGACCGATCCTGATTGCTCGCTGCGGCGAGA | 633 |
| CasPhi32 | CCACATGCAAAGTCAGATTTG | |
| R3068_ | GCTGGGGACCGATCCTGATTGCTCGCTGCGGCGAGA | 634 |
| CasPhi32 | CGCACATGCAAAGTCAGATTT | |
| R3069_ | GCTGGGGACCGATCCTGATTGCTCGCTGCGGCGAGA | 635 |
| CasPhi32 | CGCATGTGCAAACGCCTTCAA | |
| R3070_ | GCTGGGGACCGATCCTGATTGCTCGCTGCGGCGAGA | 636 |
| CasPhi32 | CAAGGCGTTTGCACATGCAAA | |
| R3071_ | GCTGGGGACCGATCCTGATTGCTCGCTGCGGCGAGA | 637 |
| CasPhi32 | CCATGTGCAAACGCCTTCAAC | |
| R3072_ | GCTGGGGACCGATCCTGATTGCTCGCTGCGGCGAGA | 638 |
| CasPhi32 | CTTGAAGGCGTTTGCACATGC | |
| R3073_ | GCTGGGGACCGATCCTGATTGCTCGCTGCGGCGAGA | 639 |
| CasPhi32 | CAACAACAGCATTATTCCAGA | |
| R3074_ | GCTGGGGACCGATCCTGATTGCTCGCTGCGGCGAGA | 640 |
| CasPhi32 | CTGGAATAATGCTGTTGTTGA | |
| R3075_ | GCTGGGGACCGATCCTGATTGCTCGCTGCGGCGAGA | 641 |
| CasPhi32 | CTTCCAGAAGACACCTTCTTC | |
| R3076_ | GCTGGGGACCGATCCTGATTGCTCGCTGCGGCGAGA | 642 |
| CasPhi32 | CCAGAAGACACCTTCTTCCCC | |
| R3077_ | GCTGGGGACCGATCCTGATTGCTCGCTGCGGCGAGA | 643 |
| CasPhi32 | CCCTGGGCTGGGGAAGAAGGT | |
| R3078_ | GCTGGGGACCGATCCTGATTGCTCGCTGCGGCGAGA | 644 |
| CasPhi32 | CTTCCCCAGCCCAGGTAAGGG | |
| R3079_ | GCTGGGGACCGATCCTGATTGCTCGCTGCGGCGAGA | 645 |
| CasPhi32 | CCCCAGCCCAGGTAAGGGCAG | |
| R3080_ | GCTGGGGACCGATCCTGATTGCTCGCTGCGGCGAGA | 646 |
| CasPhi32 | CTAAAAGGAAAAACAGACATT | |
| R3081_ | GCTGGGGACCGATCCTGATTGCTCGCTGCGGCGAGA | 647 |
| CasPhi32 | CCTAAAAGGAAAAACAGACAT | |
| R3082_ | GCTGGGGACCGATCCTGATTGCTCGCTGCGGCGAGA | 648 |
| CasPhi32 | CTTCCTTTTAGAAAGTTCCTG | |
| R3083_ | GCTGGGGACCGATCCTGATTGCTCGCTGCGGCGAGA | 649 |
| CasPhi32 | CTCCTTTTAGAAAGTTCCTGT | |
| R3084_ | GCTGGGGACCGATCCTGATTGCTCGCTGCGGCGAGA | 650 |
| CasPhi32 | CCCTTTTAGAAAGTTCCTGTG | |
| R3085_ | GCTGGGGACCGATCCTGATTGCTCGCTGCGGCGAGA | 651 |
| CasPhi32 | CCTTTTAGAAAGTTCCTGTGA | |
| R3086_ | GCTGGGGACCGATCCTGATTGCTCGCTGCGGCGAGA | 652 |
| CasPhi32 | CTAGAAAGTTCCTGTGATGTC | |
| R3136_ | GCTGGGGACCGATCCTGATTGCTCGCTGCGGCGAGA | 653 |
| CasPhi32 | CAGAAAGTTCCTGTGATGTCA | |
| R3137_ | GCTGGGGACCGATCCTGATTGCTCGCTGCGGCGAGA | 654 |
| CasPhi32 | CGAAAGTTCCTGTGATGTCAA | |
| R3138_ | GCTGGGGACCGATCCTGATTGCTCGCTGCGGCGAGA | 655 |
| CasPhi32 | CACATCACAGGAACTTTCTAA | |
| R3139_ | GCTGGGGACCGATCCTGATTGCTCGCTGCGGCGAGA | 656 |
| CasPhi32 | CCTGTGATGTCAAGCTGGTCG | |
| R3140_ | GCTGGGGACCGATCCTGATTGCTCGCTGCGGCGAGA | 657 |
| CasPhi32 | CTCGACCAGCTTGACATCACA | |
| R3141_ | GCTGGGGACCGATCCTGATTGCTCGCTGCGGCGAGA | 658 |
| CasPhi32 | CCTCGACCAGCTTGACATCAC | |
| R3142_ | GCTGGGGACCGATCCTGATTGCTCGCTGCGGCGAGA | 659 |
| CasPhi32 | CTCTCGACCAGCTTGACATCA | |
| R3143_ | GCTGGGGACCGATCCTGATTGCTCGCTGCGGCGAGA | 660 |
| CasPhi32 | CAAAGCTTTTCTCGACCAGCT | |
| R3144_ | GCTGGGGACCGATCCTGATTGCTCGCTGCGGCGAGA | 661 |
| CasPhi32 | CCAAAGCTTTTCTCGACCAGC | |
| R3145_ | GCTGGGGACCGATCCTGATTGCTCGCTGCGGCGAGA | 662 |
| CasPhi32 | CCCTGTTTCAAAGCTTTTCTC | |
| R3146_ | GCTGGGGACCGATCCTGATTGCTCGCTGCGGCGAGA | 663 |
| CasPhi32 | CGAAACAGGTAAGACAGGGGT | |
| R3147_ | GCTGGGGACCGATCCTGATTGCTCGCTGCGGCGAGA | 664 |
| CasPhi32 | CAAACAGGTAAGACAGGGGTC | |

TABLE K
CasΦ.12 gRNAs targeting human B2M in T cells

| Name | Repeat + spacer RNA Sequence (5′ → 3′), shown as DNA | SEQ ID NO |
|---|---|---|
| R3087_ | CTTTCAAGACTAATAGATTGCTCCTTACGAGGAGAC | 665 |
| CasPhi12 | AATATAAGTGGAGGCGTCGC | |
| R3088_ | CTTTCAAGACTAATAGATTGCTCCTTACGAGGAGAC | 666 |
| CasPhi12 | ATATAAGTGGAGGCGTCGCG | |
| R3089_ | CTTTCAAGACTAATAGATTGCTCCTTACGAGGAGAC | 667 |
| CasPhi12 | AGGAATGCCCGCCAGCGCGA | |
| R3090_ | CTTTCAAGACTAATAGATTGCTCCTTACGAGGAGAC | 668 |
| CasPhi12 | CTGAAGCTGACAGCATTCGG | |
| R3091_ | CTTTCAAGACTAATAGATTGCTCCTTACGAGGAGAC | 669 |
| CasPhi12 | GGGCCGAGATGTCTCGCTCC | |
| R3092_ | CTTTCAAGACTAATAGATTGCTCCTTACGAGGAGAC | 670 |
| CasPhi12 | GCTGTGCTCGCGCTACTCTC | |
| R3093_ | CTTTCAAGACTAATAGATTGCTCCTTACGAGGAGAC | 671 |
| CasPhi12 | CTGGCCTGGAGGCTATCCAG | |
| R3094_ | CTTTCAAGACTAATAGATTGCTCCTTACGAGGAGAC | 672 |
| CasPhi12 | TGGCCTGGAGGCTATCCAGC | |
| R3095_ | CTTTCAAGACTAATAGATTGCTCCTTACGAGGAGAC | 673 |
| CasPhi12 | ATGTGTCTTTTCCCGATATT | |
| R3096_ | CTTTCAAGACTAATAGATTGCTCCTTACGAGGAGAC | 674 |
| CasPhi12 | TCCCGATATTCCTCAGGTAC | |
| R3097_ | CTTTCAAGACTAATAGATTGCTCCTTACGAGGAGAC | 675 |
| CasPhi12 | CCCGATATTCCTCAGGTACT | |
| R3098_ | CTTTCAAGACTAATAGATTGCTCCTTACGAGGAGAC | 676 |
| CasPhi12 | CCGATATTCCTCAGGTACTC | |
| R3099_ | CTTTCAAGACTAATAGATTGCTCCTTACGAGGAGAC | 677 |
| CasPhi12 | GAGTACCTGAGGAATATCGG | |
| R3100_ | CTTTCAAGACTAATAGATTGCTCCTTACGAGGAGAC | 678 |
| CasPhi12 | GGAGTACCTGAGGAATATCG | |
| R3101_ | CTTTCAAGACTAATAGATTGCTCCTTACGAGGAGAC | 679 |
| CasPhi12 | CTCAGGTACTCCAAAGATTC | |
| R3102_ | CTTTCAAGACTAATAGATTGCTCCTTACGAGGAGAC | 680 |
| CasPhi12 | AGGTTTACTCACGTCATCCA | |
| R3103_ | CTTTCAAGACTAATAGATTGCTCCTTACGAGGAGAC | 681 |
| CasPhi12 | ACTCACGTCATCCAGCAGAG | |
| R3104_ | CTTTCAAGACTAATAGATTGCTCCTTACGAGGAGAC | 682 |
| CasPhi12 | CTCACGTCATCCAGCAGAGA | |
| R3105_ | CTTTCAAGACTAATAGATTGCTCCTTACGAGGAGAC | 683 |
| CasPhi12 | TCTGCTGGATGACGTGAGTA | |
| R3106_ | CTTTCAAGACTAATAGATTGCTCCTTACGAGGAGAC | 684 |
| CasPhi12 | CATTCTCTGCTGGATGACGT | |
| R3107_ | CTTTCAAGACTAATAGATTGCTCCTTACGAGGAGAC | 685 |
| CasPhi12 | CCATTCTCTGCTGGATGACG | |
| R3108_ | CTTTCAAGACTAATAGATTGCTCCTTACGAGGAGAC | 686 |
| CasPhi12 | ACTTTCCATTCTCTGCTGGA | |
| R3109_ | CTTTCAAGACTAATAGATTGCTCCTTACGAGGAGAC | 687 |
| CasPhi12 | GACTTTCCATTCTCTGCTGG | |
| R3110_ | CTTTCAAGACTAATAGATTGCTCCTTACGAGGAGAC | 688 |
| CasPhi12 | AGGAAATTTGACTTTCCATT | |
| R3111_ | CTTTCAAGACTAATAGATTGCTCCTTACGAGGAGAC | 689 |
| CasPhi12 | CCTGAATTGCTATGTGTCTG | |
| R3112_ | CTTTCAAGACTAATAGATTGCTCCTTACGAGGAGAC | 690 |
| CasPhi12 | CTGAATTGCTATGTGTCTGG | |
| R3113_ | CTTTCAAGACTAATAGATTGCTCCTTACGAGGAGAC | 691 |
| CasPhi12 | CTATGTGTCTGGGTTTCATC | |
| R3114_ | CTTTCAAGACTAATAGATTGCTCCTTACGAGGAGAC | 692 |
| CasPhi12 | AATGTCGGATGGATGAAACC | |
| R3115_ | CTTTCAAGACTAATAGATTGCTCCTTACGAGGAGAC | 693 |
| CasPhi12 | CATCCATCCGACATTGAAGT | |
| R3116_ | CTTTCAAGACTAATAGATTGCTCCTTACGAGGAGAC | 694 |
| CasPhi12 | ATCCATCCGACATTGAAGTT | |
| R3117_ | CTTTCAAGACTAATAGATTGCTCCTTACGAGGAGAC | 695 |
| CasPhi12 | AGTAAGTCAACTTCAATGTC | |
| R3118_ | CTTTCAAGACTAATAGATTGCTCCTTACGAGGAGAC | 696 |
| CasPhi12 | TTCAGTAAGTCAACTTCAAT | |
| R3119_ | CTTTCAAGACTAATAGATTGCTCCTTACGAGGAGAC | 697 |
| CasPhi12 | AAGTTGACTTACTGAAGAAT | |
| R3120_ | CTTTCAAGACTAATAGATTGCTCCTTACGAGGAGAC | 698 |
| CasPhi12 | ACTTACTGAAGAATGGAGAG | |
| R3121_ | CTTTCAAGACTAATAGATTGCTCCTTACGAGGAGAC | 699 |
| CasPhi12 | TCTCTCCATTCTTCAGTAAG | |
| R3122_ | CTTTCAAGACTAATAGATTGCTCCTTACGAGGAGAC | 700 |
| CasPhi12 | CTGAAGAATGGAGAGAGAAT | |
| R3123_ | CTTTCAAGACTAATAGATTGCTCCTTACGAGGAGAC | 701 |
| CasPhi12 | AATTCTCTCTCCATTCTTCA | |
| R3124_ | CTTTCAAGACTAATAGATTGCTCCTTACGAGGAGAC | 702 |
| CasPhi12 | CAATTCTCTCTCCATTCTTC | |
| R3125_ | CTTTCAAGACTAATAGATTGCTCCTTACGAGGAGAC | 703 |
| CasPhi12 | TCAATTCTCTCTCCATTCTT | |
| R3126_ | CTTTCAAGACTAATAGATTGCTCCTTACGAGGAGAC | 704 |
| CasPhi12 | TTCAATTCTCTCTCCATTCT | |
| R3127_ | CTTTCAAGACTAATAGATTGCTCCTTACGAGGAGAC | 705 |
| CasPhi12 | AAAAAGTGGAGCATTCAGAC | |
| R3128_ | CTTTCAAGACTAATAGATTGCTCCTTACGAGGAGAC | 706 |
| CasPhi12 | CTGAAAGACAAGTCTGAATG | |
| R3129_ | CTTTCAAGACTAATAGATTGCTCCTTACGAGGAGAC | 707 |
| CasPhi12 | AGACTTGTCTTTCAGCAAGG | |
| R3130_ | CTTTCAAGACTAATAGATTGCTCCTTACGAGGAGAC | 708 |
| CasPhi12 | TCTTTCAGCAAGGACTGGTC | |
| R3131_ | CTTTCAAGACTAATAGATTGCTCCTTACGAGGAGAC | 709 |
| CasPhi12 | CAGCAAGGACTGGTCTTTCT | |
| R3132_ | CTTTCAAGACTAATAGATTGCTCCTTACGAGGAGAC | 710 |
| CasPhi12 | AGCAAGGACTGGTCTTTCTA | |
| R3133_ | CTTTCAAGACTAATAGATTGCTCCTTACGAGGAGAC | 711 |
| CasPhi12 | CTATCTCTTGTACTACACTG | |
| R3134_ | CTTTCAAGACTAATAGATTGCTCCTTACGAGGAGAC | 712 |
| CasPhi12 | TATCTCTTGTACTACACTGA | |
| R3135_ | CTTTCAAGACTAATAGATTGCTCCTTACGAGGAGAC | 713 |
| CasPhi12 | AGTGTAGTACAAGAGATAGA | |
| R3148_ | CTTTCAAGACTAATAGATTGCTCCTTACGAGGAGAC | 714 |
| CasPhi12 | TACTACACTGAATTCACCCC | |
| R3149_ | CTTTCAAGACTAATAGATTGCTCCTTACGAGGAGAC | 715 |
| CasPhi12 | AGTGGGGGTGAATTCAGTGT | |
| R3150_ | CTTTCAAGACTAATAGATTGCTCCTTACGAGGAGAC | 716 |
| CasPhi12 | CAGTGGGGGTGAATTCAGTG | |
| R3151_ | CTTTCAAGACTAATAGATTGCTCCTTACGAGGAGAC | 717 |
| CasPhi12 | TCAGTGGGGGTGAATTCAGT | |
| R3152_ | CTTTCAAGACTAATAGATTGCTCCTTACGAGGAGAC | 718 |
| CasPhi12 | TTCAGTGGGGGTGAATTCAG | |
| R3153_ | CTTTCAAGACTAATAGATTGCTCCTTACGAGGAGAC | 719 |
| CasPhi12 | ACCCCCACTGAAAAAGATGA | |
| R3154_ | CTTTCAAGACTAATAGATTGCTCCTTACGAGGAGAC | 720 |
| CasPhi12 | ACACGGCAGGCATACTCATC | |
| R3155_ | CTTTCAAGACTAATAGATTGCTCCTTACGAGGAGAC | 721 |
| CasPhi12 | GGCTGTGACAAAGTCACATG | |
| R3156_ | CTTTCAAGACTAATAGATTGCTCCTTACGAGGAGAC | 722 |
| CasPhi12 | GTCACAGCCCAAGATAGTTA | |
| R3157_ | CTTTCAAGACTAATAGATTGCTCCTTACGAGGAGAC | 723 |
| CasPhi12 | TCACAGCCCAAGATAGTTAA | |
| R3158_ | CTTTCAAGACTAATAGATTGCTCCTTACGAGGAGAC | 724 |
| CasPhi12 | ACTATCTTGGGCTGTGACAA | |
| R3159_ | CTTTCAAGACTAATAGATTGCTCCTTACGAGGAGAC | 725 |
| CasPhi12 | CCCCACTTAACTATCTTGGG | |

TABLE L
CasΦ.32 gRNAs targeting human B2M in T cells

| Name | Repeat + spacer RNA Sequence (5′ → 3′), shown as DNA | SEQ ID NO |
|---|---|---|
| R3087_ | GCTGGGGACCGATCCTGATTGCTCGCTGCGGCGAGA | 726 |
| CasPhi32 | CAATATAAGTGGAGGCGTCGC | |
| R3088_ | GCTGGGGACCGATCCTGATTGCTCGCTGCGGCGAGA | 727 |
| CasPhi32 | CATATAAGTGGAGGCGTCGCG | |
| R3089_ | GCTGGGGACCGATCCTGATTGCTCGCTGCGGCGAGA | 728 |
| CasPhi32 | CAGGAATGCCCGCCAGCGCGA | |
| R3090_ | GCTGGGGACCGATCCTGATTGCTCGCTGCGGCGAGA | 729 |
| CasPhi32 | CCTGAAGCTGACAGCATTCGG | |
| R3091_ | GCTGGGGACCGATCCTGATTGCTCGCTGCGGCGAGA | 730 |
| CasPhi32 | CGGGCCGAGATGTCTCGCTCC | |
| R3092_ | GCTGGGGACCGATCCTGATTGCTCGCTGCGGCGAGA | 731 |
| CasPhi32 | CGCTGTGCTCGCGCTACTCTC | |
| R3093_ | GCTGGGGACCGATCCTGATTGCTCGCTGCGGCGAGA | 732 |
| CasPhi32 | CCTGGCCTGGAGGCTATCCAG | |
| R3094_ | GCTGGGGACCGATCCTGATTGCTCGCTGCGGCGAGA | 733 |
| CasPhi32 | CTGGCCTGGAGGCTATCCAGC | |
| R3095_ | GCTGGGGACCGATCCTGATTGCTCGCTGCGGCGAGA | 734 |
| CasPhi32 | CATGTGTCTTTTCCCGATATT | |
| R3096_ | GCTGGGGACCGATCCTGATTGCTCGCTGCGGCGAGA | 735 |
| CasPhi32 | CTCCCGATATTCCTCAGGTAC | |
| R3097_ | GCTGGGGACCGATCCTGATTGCTCGCTGCGGCGAGA | 736 |
| CasPhi32 | CCCCGATATTCCTCAGGTACT | |
| R3098_ | GCTGGGGACCGATCCTGATTGCTCGCTGCGGCGAGA | 737 |
| CasPhi32 | CCCGATATTCCTCAGGTACTC | |
| R3099_ | GCTGGGGACCGATCCTGATTGCTCGCTGCGGCGAGA | 738 |
| CasPhi32 | CGAGTACCTGAGGAATATCGG | |
| R3100_ | GCTGGGGACCGATCCTGATTGCTCGCTGCGGCGAGA | 739 |
| CasPhi32 | CGGAGTACCTGAGGAATATCG | |
| R3101_ | GCTGGGGACCGATCCTGATTGCTCGCTGCGGCGAGA | 740 |
| CasPhi32 | CCTCAGGTACTCCAAAGATTC | |
| R3102_ | GCTGGGGACCGATCCTGATTGCTCGCTGCGGCGAGA | 741 |
| CasPhi32 | CAGGTTTACTCACGTCATCCA | |
| R3103_ | GCTGGGGACCGATCCTGATTGCTCGCTGCGGCGAGA | 742 |
| CasPhi32 | CACTCACGTCATCCAGCAGAG | |
| R3104_ | GCTGGGGACCGATCCTGATTGCTCGCTGCGGCGAGA | 743 |
| CasPhi32 | CCTCACGTCATCCAGCAGAGA | |
| R3105_ | GCTGGGGACCGATCCTGATTGCTCGCTGCGGCGAGA | 744 |
| CasPhi32 | CTCTGCTGGATGACGTGAGTA | |
| R3106_ | GCTGGGGACCGATCCTGATTGCTCGCTGCGGCGAGA | 745 |
| CasPhi32 | CCATTCTCTGCTGGATGACGT | |
| R3107_ | GCTGGGGACCGATCCTGATTGCTCGCTGCGGCGAGA | 746 |
| CasPhi32 | CCCATTCTCTGCTGGATGACG | |
| R3108_ | GCTGGGGACCGATCCTGATTGCTCGCTGCGGCGAGA | 747 |
| CasPhi32 | CACTTTCCATTCTCTGCTGGA | |
| R3109_ | GCTGGGGACCGATCCTGATTGCTCGCTGCGGCGAGA | 748 |
| CasPhi32 | CGACTTTCCATTCTCTGCTGG | |
| R3110_ | GCTGGGGACCGATCCTGATTGCTCGCTGCGGCGAGA | 749 |
| CasPhi32 | CAGGAAATTTGACTTTCCATT | |
| R3111_ | GCTGGGGACCGATCCTGATTGCTCGCTGCGGCGAGA | 750 |
| CasPhi32 | CCCTGAATTGCTATGTGTCTG | |
| R3112_ | GCTGGGGACCGATCCTGATTGCTCGCTGCGGCGAGA | 751 |
| CasPhi32 | CCTGAATTGCTATGTGTCTGG | |
| R3113_ | GCTGGGGACCGATCCTGATTGCTCGCTGCGGCGAGA | 752 |
| CasPhi32 | CCTATGTGTCTGGGTTTCATC | |
| R3114_ | GCTGGGGACCGATCCTGATTGCTCGCTGCGGCGAGA | 753 |
| CasPhi32 | CAATGTCGGATGGATGAAACC | |
| R3115_ | GCTGGGGACCGATCCTGATTGCTCGCTGCGGCGAGA | 754 |
| CasPhi32 | CCATCCATCCGACATTGAAGT | |
| R3116_ | GCTGGGGACCGATCCTGATTGCTCGCTGCGGCGAGA | 755 |
| CasPhi32 | CATCCATCCGACATTGAAGTT | |
| R3117_ | GCTGGGGACCGATCCTGATTGCTCGCTGCGGCGAGA | 756 |
| CasPhi32 | CAGTAAGTCAACTTCAATGTC | |
| R3118_ | GCTGGGGACCGATCCTGATTGCTCGCTGCGGCGAGA | 757 |
| CasPhi32 | CTTCAGTAAGTCAACTTCAAT | |
| R3119_ | GCTGGGGACCGATCCTGATTGCTCGCTGCGGCGAGA | 758 |
| CasPhi32 | CAAGTTGACTTACTGAAGAAT | |
| R3120_ | GCTGGGGACCGATCCTGATTGCTCGCTGCGGCGAGA | 759 |
| CasPhi32 | CACTTACTGAAGAATGGAGAG | |
| R3121_ | GCTGGGGACCGATCCTGATTGCTCGCTGCGGCGAGA | 760 |
| CasPhi32 | CTCTCTCCATTCTTCAGTAAG | |
| R3122_ | GCTGGGGACCGATCCTGATTGCTCGCTGCGGCGAGA | 761 |
| CasPhi32 | CCTGAAGAATGGAGAGAGAAT | |
| R3123_ | GCTGGGGACCGATCCTGATTGCTCGCTGCGGCGAGA | 762 |
| CasPhi32 | CAATTCTCTCTCCATTCTTCA | |
| R3124_ | GCTGGGGACCGATCCTGATTGCTCGCTGCGGCGAGA | 763 |
| CasPhi32 | CCAATTCTCTCTCCATTCTTC | |
| R3125_ | GCTGGGGACCGATCCTGATTGCTCGCTGCGGCGAGA | 764 |
| CasPhi32 | CTCAATTCTCTCTCCATTCTT | |
| R3126_ | GCTGGGGACCGATCCTGATTGCTCGCTGCGGCGAGA | 765 |
| CasPhi32 | CTTCAATTCTCTCTCCATTCT | |
| R3127_ | GCTGGGGACCGATCCTGATTGCTCGCTGCGGCGAGA | 766 |
| CasPhi32 | CAAAAAGTGGAGCATTCAGAC | |
| R3128_ | GCTGGGGACCGATCCTGATTGCTCGCTGCGGCGAGA | 767 |
| CasPhi32 | CCTGAAAGACAAGTCTGAATG | |
| R3129_ | GCTGGGGACCGATCCTGATTGCTCGCTGCGGCGAGA | 768 |
| CasPhi32 | CAGACTTGTCTTTCAGCAAGG | |
| R3130_ | GCTGGGGACCGATCCTGATTGCTCGCTGCGGCGAGA | 769 |
| CasPhi32 | CTCTTTCAGCAAGGACTGGTC | |
| R3131_ | GCTGGGGACCGATCCTGATTGCTCGCTGCGGCGAGA | 770 |
| CasPhi32 | CCAGCAAGGACTGGTCTTTCT | |
| R3132_ | GCTGGGGACCGATCCTGATTGCTCGCTGCGGCGAGA | 771 |
| CasPhi32 | CAGCAAGGACTGGTCTTTCTA | |
| R3133_ | GCTGGGGACCGATCCTGATTGCTCGCTGCGGCGAGA | 772 |
| CasPhi32 | CCTATCTCTTGTACTACACTG | |
| R3134_ | GCTGGGGACCGATCCTGATTGCTCGCTGCGGCGAGA | 773 |
| CasPhi32 | CTATCTCTTGTACTACACTGA | |
| R3135_ | GCTGGGGACCGATCCTGATTGCTCGCTGCGGCGAGA | 774 |
| CasPhi32 | CAGTGTAGTACAAGAGATAGA | |
| R3148_ | GCTGGGGACCGATCCTGATTGCTCGCTGCGGCGAGA | 775 |
| CasPhi32 | CTACTACACTGAATTCACCCC | |
| R3149_ | GCTGGGGACCGATCCTGATTGCTCGCTGCGGCGAGA | 776 |
| CasPhi32 | CAGTGGGGGTGAATTCAGTGT | |
| R3150_ | GCTGGGGACCGATCCTGATTGCTCGCTGCGGCGAGA | 777 |
| CasPhi32 | CCAGTGGGGGTGAATTCAGTG | |
| R3151_ | GCTGGGGACCGATCCTGATTGCTCGCTGCGGCGAGA | 778 |
| CasPhi32 | CTCAGTGGGGGTGAATTCAGT | |
| R3152_ | GCTGGGGACCGATCCTGATTGCTCGCTGCGGCGAGA | 779 |
| CasPhi32 | CTTCAGTGGGGGTGAATTCAG | |
| R3153_ | GCTGGGGACCGATCCTGATTGCTCGCTGCGGCGAGA | 780 |
| CasPhi32 | CACCCCCACTGAAAAAGATGA | |
| R3154_ | GCTGGGGACCGATCCTGATTGCTCGCTGCGGCGAGA | 781 |
| CasPhi32 | CACACGGCAGGCATACTCATC | |
| R3155_ | GCTGGGGACCGATCCTGATTGCTCGCTGCGGCGAGA | 782 |
| CasPhi32 | CGGCTGTGACAAAGTCACATG | |
| R3156_ | GCTGGGGACCGATCCTGATTGCTCGCTGCGGCGAGA | 783 |
| CasPhi32 | CGTCACAGCCCAAGATAGTTA | |
| R3157_ | GCTGGGGACCGATCCTGATTGCTCGCTGCGGCGAGA | 784 |
| CasPhi32 | CTCACAGCCCAAGATAGTTAA | |
| R3158_ | GCTGGGGACCGATCCTGATTGCTCGCTGCGGCGAGA | 785 |
| CasPhi32 | CACTATCTTGGGCTGTGACAA | |
| R3159_ | GCTGGGGACCGATCCTGATTGCTCGCTGCGGCGAGA | 786 |
| CasPhi32 | CCCCCACTTAACTATCTTGGG | |

TABLE M
CasΦ.12 gRNAs targeting human PD1 in T cells

| Name | Repeat + spacer RNA Sequence (5′ → 3′) | SEQ ID NO |
|---|---|---|
| R2921_ | CUUUCAAGACUAAUAGAUUGCUCCUUACGAGGAG | 787 |
| CasPhi12 | ACCCUUCCGCUCACCUCCGCCU | |
| R2922_ | CUUUCAAGACUAAUAGAUUGCUCCUUACGAGGAG | 788 |
| CasPhi12 | ACCCUUCCGCUCACCUCCGCCU | |
| R2923_ | CUUUCAAGACUAAUAGAUUGCUCCUUACGAGGAG | 789 |
| CasPhi12 | ACCGCUCACCUCCGCCUGAGCA | |
| R2924_ | CUUUCAAGACUAAUAGAUUGCUCCUUACGAGGAG | 790 |
| CasPhi12 | ACUCCACUGCUCAGGCGGAGGU | |
| R2925_ | CUUUCAAGACUAAUAGAUUGCUCCUUACGAGGAG | 791 |
| CasPhi12 | ACUAGCACCGCCCAGACGACUG | |
| R2926_ | CUUUCAAGACUAAUAGAUUGCUCCUUACGAGGAG | 792 |
| CasPhi12 | ACAGGCAUGCAGAUCCCACAGG | |
| R2927_ | CUUUCAAGACUAAUAGAUUGCUCCUUACGAGGAG | 793 |
| CasPhi12 | ACCACAGGCGCCCUGGCCAGUC | |
| R2928_ | CUUUCAAGACUAAUAGAUUGCUCCUUACGAGGAG | 794 |
| CasPhi12 | ACUCUGGGCGGUGCUACAACUG | |
| R2929_ | CUUUCAAGACUAAUAGAUUGCUCCUUACGAGGAG | 795 |
| CasPhi12 | ACGCAUGCCUGGAGCAGCCCCA | |
| R2930_ | CUUUCAAGACUAAUAGAUUGCUCCUUACGAGGAG | 796 |
| CasPhi12 | ACUAGCACCGCCCAGACGACUG | |
| R2931_ | CUUUCAAGACUAAUAGAUUGCUCCUUACGAGGAG | 797 |
| CasPhi12 | ACUGGCCGCCAGCCCAGUUGUA | |
| R2932_ | CUUUCAAGACUAAUAGAUUGCUCCUUACGAGGAG | 798 |
| CasPhi12 | ACCUUCCGCUCACCUCCGCCUG | |
| R2933_ | CUUUCAAGACUAAUAGAUUGCUCCUUACGAGGAG | 799 |
| CasPhi12 | ACCAGGGCCUGUCUGGGGAGUC | |
| R2934_ | CUUUCAAGACUAAUAGAUUGCUCCUUACGAGGAG | 800 |
| CasPhi12 | ACUCCCCAGCCCUGCUCGUGGU | |
| R2935_ | CUUUCAAGACUAAUAGAUUGCUCCUUACGAGGAG | 801 |
| CasPhi12 | ACGGUCACCACGAGCAGGGCUG | |
| R2936_ | CUUUCAAGACUAAUAGAUUGCUCCUUACGAGGAG | 802 |
| CasPhi12 | ACUCCCCUUCGGUCACCACGAG | |
| R2937_ | CUUUCAAGACUAAUAGAUUGCUCCUUACGAGGAG | 803 |
| CasPhi12 | ACGAGAAGCUGCAGGUGAAGGU | |
| R2938_ | CUUUCAAGACUAAUAGAUUGCUCCUUACGAGGAG | 804 |
| CasPhi12 | ACACCUGCAGCUUCUCCAACAC | |
| R2939_ | CUUUCAAGACUAAUAGAUUGCUCCUUACGAGGAG | 805 |
| CasPhi12 | ACUCCAACACAUCGGAGAGCUU | |
| R2940_ | CUUUCAAGACUAAUAGAUUGCUCCUUACGAGGAG | 806 |
| CasPhi12 | ACGCACGAAGCUCUCCGAUGUG | |
| R2941_ | CUUUCAAGACUAAUAGAUUGCUCCUUACGAGGAG | 807 |
| CasPhi12 | ACAGCACGAAGCUCUCCGAUGU | |
| R2942_ | CUUUCAAGACUAAUAGAUUGCUCCUUACGAGGAG | 808 |
| CasPhi12 | ACGUGCUAAACUGGUACCGCAU | |
| R2943_ | CUUUCAAGACUAAUAGAUUGCUCCUUACGAGGAG | 809 |
| CasPhi12 | ACCUGGGGCUCAUGCGGUACCA | |
| R2944_ | CUUUCAAGACUAAUAGAUUGCUCCUUACGAGGAG | 810 |
| CasPhi12 | ACUCCGUCUGGUUGCUGGGGCU | |
| R2945_ | CUUUCAAGACUAAUAGAUUGCUCCUUACGAGGAG | 811 |
| CasPhi12 | ACCCCGAGGACCGCAGCCAGCC | |
| R2946_ | CUUUCAAGACUAAUAGAUUGCUCCUUACGAGGAG | 812 |
| CasPhi12 | ACUGUGACACGGAAGCGGCAGU | |
| R2947_ | CUUUCAAGACUAAUAGAUUGCUCCUUACGAGGAG | 813 |
| CasPhi12 | ACCGUGUCACACAACUGCCCAA | |
| R2948_ | CUUUCAAGACUAAUAGAUUGCUCCUUACGAGGAG | 814 |
| CasPhi12 | ACGGCAGUUGUGUGACACGGAA | |
| R2949_ | CUUUCAAGACUAAUAGAUUGCUCCUUACGAGGAG | 815 |
| CasPhi12 | ACCACAUGAGCGUGGUCAGGGC | |
| R2950_ | CUUUCAAGACUAAUAGAUUGCUCCUUACGAGGAG | 816 |
| CasPhi12 | ACCGCCGGGCCCUGACCACGCU | |
| R2951_ | CUUUCAAGACUAAUAGAUUGCUCCUUACGAGGAG | 817 |
| CasPhi12 | ACGGGGCCAGGGAGAUGGCCCC | |
| R2952_ | CUUUCAAGACUAAUAGAUUGCUCCUUACGAGGAG | 818 |
| CasPhi12 | ACAUCUGCGCCUUGGGGGCCAG | |
| R2953_ | CUUUCAAGACUAAUAGAUUGCUCCUUACGAGGAG | 819 |
| CasPhi12 | ACGAUCUGCGCCUUGGGGGCCA | |
| R2954_ | CUUUCAAGACUAAUAGAUUGCUCCUUACGAGGAG | 820 |
| CasPhi12 | ACCCAGACAGGCCCUGGAACCC | |
| R2955_ | CUUUCAAGACUAAUAGAUUGCUCCUUACGAGGAG | 821 |
| CasPhi12 | ACCCAGCCCUGCUCGUGGUGAC | |
| R2956_ | CUUUCAAGACUAAUAGAUUGCUCCUUACGAGGAG | 822 |
| CasPhi12 | ACUCUCUGGAAGGGCACAAAGG | |
| R2957_ | CUUUCAAGACUAAUAGAUUGCUCCUUACGAGGAG | 823 |
| CasPhi12 | ACGUGCCCUUCCAGAGAGAAGG | |
| R2958_ | CUUUCAAGACUAAUAGAUUGCUCCUUACGAGGAG | 824 |
| CasPhi12 | ACUGCCCUUCCAGAGAGAAGGG | |
| R2959_ | CUUUCAAGACUAAUAGAUUGCUCCUUACGAGGAG | 825 |
| CasPhi12 | ACUGCCCUUCUCUCUGGAAGGG | |
| R2960_ | CUUUCAAGACUAAUAGAUUGCUCCUUACGAGGAG | 826 |
| CasPhi12 | ACCAGAGAGAAGGGCAGAAGUG | |
| R2961_ | CUUUCAAGACUAAUAGAUUGCUCCUUACGAGGAG | 827 |
| CasPhi12 | ACGAACUGGCCGGCUGGCCUGG | |
| R2962_ | CUUUCAAGACUAAUAGAUUGCUCCUUACGAGGAG | 828 |
| CasPhi12 | ACGGAACUGGCCGGCUGGCCUG | |
| R2963_ | CUUUCAAGACUAAUAGAUUGCUCCUUACGAGGAG | 829 |
| CasPhi12 | ACCAAACCCUGGUGGUUGGUGU | |
| R2964_ | CUUUCAAGACUAAUAGAUUGCUCCUUACGAGGAG | 830 |
| CasPhi12 | ACGUGUCGUGGGCGGCCUGCUG | |
| R2965_ | CUUUCAAGACUAAUAGAUUGCUCCUUACGAGGAG | 831 |
| CasPhi12 | ACCCUCGUGCGGCCCGGGAGCA | |
| R2966_ | CUUUCAAGACUAAUAGAUUGCUCCUUACGAGGAG | 832 |
| CasPhi12 | ACUCCCUGCAGAGAAACACACU | |
| R2967_ | CUUUCAAGACUAAUAGAUUGCUCCUUACGAGGAG | 833 |
| CasPhi12 | ACCUCUGCAGGGACAAUAGGAG | |
| R2968_ | CUUUCAAGACUAAUAGAUUGCUCCUUACGAGGAG | 834 |
| CasPhi12 | ACUCUGCAGGGACAAUAGGAGC | |
| R2969_ | CUUUCAAGACUAAUAGAUUGCUCCUUACGAGGAG | 835 |
| CasPhi12 | ACCUCCUCAAAGAAGGAGGACC | |
| R2970_ | CUUUCAAGACUAAUAGAUUGCUCCUUACGAGGAG | 836 |
| CasPhi12 | ACUCCUCAAAGAAGGAGGACCC | |
| R2971_ | CUUUCAAGACUAAUAGAUUGCUCCUUACGAGGAG | 837 |
| CasPhi12 | ACUCUGUGGACUAUGGGGAGCU | |
| R2972_ | CUUUCAAGACUAAUAGAUUGCUCCUUACGAGGAG | 838 |
| CasPhi12 | ACUCUCGCCACUGGAAAUCCAG | |
| R2973_ | CUUUCAAGACUAAUAGAUUGCUCCUUACGAGGAG | 839 |
| CasPhi12 | ACCCAGUGGCGAGAGAAGACCC | |
| R2974_ | CUUUCAAGACUAAUAGAUUGCUCCUUACGAGGAG | 840 |
| CasPhi12 | ACCAGUGGCGAGAGAAGACCCC | |
| R2975_ | CUUUCAAGACUAAUAGAUUGCUCCUUACGAGGAG | 841 |
| CasPhi12 | ACCGCUAGGAAAGACAAUGGUG | |
| R2976_ | CUUUCAAGACUAAUAGAUUGCUCCUUACGAGGAG | 842 |
| CasPhi12 | ACUCUUUCCUAGCGGAAUGGGC | |
| R2977_ | CUUUCAAGACUAAUAGAUUGCUCCUUACGAGGAG | 843 |
| CasPhi12 | ACCCUAGCGGAAUGGGCACCUC | |
| R2978_ | CUUUCAAGACUAAUAGAUUGCUCCUUACGAGGAG | 844 |
| CasPhi12 | ACCUAGCGGAAUGGGCACCUCA | |
| R2979_ | CUUUCAAGACUAAUAGAUUGCUCCUUACGAGGAG | 845 |
| CasPhi12 | ACGCCCCUCUGACCGGCUUCCU | |
| R2980_ | CUUUCAAGACUAAUAGAUUGCUCCUUACGAGGAG | 846 |
| CasPhi12 | ACCUUGGCCACCAGUGUUCUGC | |
| R2981_ | CUUUCAAGACUAAUAGAUUGCUCCUUACGAGGAG | 847 |
| CasPhi12 | ACGCCACCAGUGUUCUGCAGAC | |
| R2982_ | CUUUCAAGACUAAUAGAUUGCUCCUUACGAGGAG | 848 |
| CasPhi12 | ACUGCAGACCCUCCACCAUGAG | |
| R2983_ | CUUUCAAGACUAAUAGAUUGCUCCUUACGAGGAG | 849 |
| CasPhi12 | ACUCCUGAGGAAAUGCGCUGAC | |
| R2984_ | CUUUCAAGACUAAUAGAUUGCUCCUUACGAGGAG | 850 |
| CasPhi12 | ACCCUCAGGAGAAGCAGGCAGG | |
| R2985_ | CUUUCAAGACUAAUAGAUUGCUCCUUACGAGGAG | 851 |
| CasPhi12 | ACCUCAGGAGAAGCAGGCAGGG | |
| R2986_ | CUUUCAAGACUAAUAGAUUGCUCCUUACGAGGAG | 852 |
| CasPhi12 | ACCAGGCCGUCCAGGGGCUGAG | |
| R2987_ | CUUUCAAGACUAAUAGAUUGCUCCUUACGAGGAG | 853 |
| CasPhi12 | ACAGACAUGAGUCCUGUGGUGG | |
| R2988_ | CUUUCAAGACUAAUAGAUUGCUCCUUACGAGGAG | 854 |
| CasPhi12 | ACAGGUCCUGCCAGCACAGAGC | |
| R2989_ | CUUUCAAGACUAAUAGAUUGCUCCUUACGAGGAG | 855 |
| CasPhi12 | ACAGGGAGCUGGACGCAGGCAG | |
| R2990_ | CUUUCAAGACUAAUAGAUUGCUCCUUACGAGGAG | 856 |
| CasPhi12 | ACAGCCCCGGGCCGCAGGCAGC | |
| R2991_ | CUUUCAAGACUAAUAGAUUGCUCCUUACGAGGAG | 857 |
| CasPhi12 | ACAGGCAGGAGGCUCCGGGGCG | |
| R2992_ | CUUUCAAGACUAAUAGAUUGCUCCUUACGAGGAG | 858 |
| CasPhi12 | ACGGGGCUGGUUGGAGAUGGCC | |
| R2993_ | CUUUCAAGACUAAUAGAUUGCUCCUUACGAGGAG | 859 |
| CasPhi12 | ACGAGAUGGCCUUGGAGCAGCC | |
| R2994_ | CUUUCAAGACUAAUAGAUUGCUCCUUACGAGGAG | 860 |
| CasPhi12 | ACGCUGCUCCAAGGCCAUCUCC | |
| R2995_ | CUUUCAAGACUAAUAGAUUGCUCCUUACGAGGAG | 861 |
| CasPhi12 | ACGAGCAGCCAAGGUGCCCCUG | |
| R2996_ | CUUUCAAGACUAAUAGAUUGCUCCUUACGAGGAG | 862 |
| CasPhi12 | ACGGGAUGCCACUGCCAGGGGC | |
| R2997_ | CUUUCAAGACUAAUAGAUUGCUCCUUACGAGGAG | 863 |
| CasPhi12 | ACCGGGAUGCCACUGCCAGGGG | |
| R2998_ | CUUUCAAGACUAAUAGAUUGCUCCUUACGAGGAG | 864 |
| CasPhi12 | ACGGCCCUGCGUCCAGGGCGUU | |
| R2999_ | CUUUCAAGACUAAUAGAUUGCUCCUUACGAGGAG | 865 |
| CasPhi12 | ACUCUGCUCCCUGCAGGCCUAG | |
| R3000_ | CUUUCAAGACUAAUAGAUUGCUCCUUACGAGGAG | 866 |
| CasPhi12 | ACUCUAGGCCUGCAGGGAGCAG | |
| R3001_ | CUUUCAAGACUAAUAGAUUGCUCCUUACGAGGAG | 867 |
| CasPhi12 | ACCCUGAAACUUCUCUAGGCCU | |
| R3002_ | CUUUCAAGACUAAUAGAUUGCUCCUUACGAGGAG | 868 |
| CasPhi12 | ACUGACCUUCCCUGAAACUUCU | |
| R3003_ | CUUUCAAGACUAAUAGAUUGCUCCUUACGAGGAG | 869 |
| CasPhi12 | ACCAGGGAAGGUCAGAAGAGCU | |
| R3004_ | CUUUCAAGACUAAUAGAUUGCUCCUUACGAGGAG | 870 |
| CasPhi12 | ACAGGGAAGGUCAGAAGAGCUC | |
| R3005_ | CUUUCAAGACUAAUAGAUUGCUCCUUACGAGGAG | 871 |
| CasPhi12 | ACCUGCCCUGCCCACCACAGCC | |
| R3006_ | CUUUCAAGACUAAUAGAUUGCUCCUUACGAGGAG | 872 |
| CasPhi12 | ACCCUGCCCUGCCCACCACAGC | |
| R3007_ | CUUUCAAGACUAAUAGAUUGCUCCUUACGAGGAG | 873 |
| CasPhi12 | ACACACAUGCCCAGGCAGCACC | |
| R3008_ | CUUUCAAGACUAAUAGAUUGCUCCUUACGAGGAG | 874 |
| CasPhi12 | ACCACAUGCCCAGGCAGCACCU | |
| R3009_ | CUUUCAAGACUAAUAGAUUGCUCCUUACGAGGAG | 875 |
| CasPhi12 | ACCCUGCCCCACAAAGGGCCUG | |
| R3010_ | CUUUCAAGACUAAUAGAUUGCUCCUUACGAGGAG | 876 |
| CasPhi12 | ACGUGGGGCAGGGAAGCUGAGG | |
| R3011_ | CUUUCAAGACUAAUAGAUUGCUCCUUACGAGGAG | 877 |
| CasPhi12 | ACUGGGGCAGGGAAGCUGAGGC | |
| R3012_ | CUUUCAAGACUAAUAGAUUGCUCCUUACGAGGAG | 878 |
| CasPhi12 | ACCUGCCUCAGCUUCCCUGCCC | |
| R3013_ | CUUUCAAGACUAAUAGAUUGCUCCUUACGAGGAG | 879 |
| CasPhi12 | ACCAGGCCCAGCCAGCACUCUG | |
| R3014_ | CUUUCAAGACUAAUAGAUUGCUCCUUACGAGGAG | 880 |
| CasPhi12 | ACAGGCCCAGCCAGCACUCUGG | |
| R3015_ | CUUUCAAGACUAAUAGAUUGCUCCUUACGAGGAG | 881 |
| CasPhi12 | ACCACCCCAGCCCCUCACACCA | |
| R3016_ | CUUUCAAGACUAAUAGAUUGCUCCUUACGAGGAG | 882 |
| CasPhi12 | ACGGACCGUAGGAUGUCCCUCU | |

TABLE N
CasΦ.32 gRNAs targeting human PD1 in T cells

| | | SEQ |
|---|---|---|
| | Repeat + spacer RNA Sequence | ID |
| Name | (5′ → 3′) | NO |
| R2921_ | GCUGGGGACCGAUCCUGAUUGCUCGCUGCGGCGA | 883 |
| CasPhi32 | GACCCUUCCGCUCACCUCCGCCU | |
| R2922_ | GCUGGGGACCGAUCCUGAUUGCUCGCUGCGGCGA | 884 |
| CasPhi32 | GACCCUUCCGCUCACCUCCGCCU | |
| R2923_ | GCUGGGGACCGAUCCUGAUUGCUCGCUGCGGCGA | 885 |
| CasPhi32 | GACCGCUCACCUCCGCCUGAGCA | |
| R2924_ | GCUGGGGACCGAUCCUGAUUGCUCGCUGCGGCGA | 886 |
| CasPhi32 | GACUCCACUGCUCAGGCGGAGGU | |
| R2925_ | GCUGGGGACCGAUCCUGAUUGCUCGCUGCGGCGA | 887 |
| CasPhi32 | GACUAGCACCGCCCAGACGACUG | |
| R2926_ | GCUGGGGACCGAUCCUGAUUGCUCGCUGCGGCGA | 888 |
| CasPhi32 | GACAGGCAUGCAGAUCCCACAGG | |
| R2927_ | GCUGGGGACCGAUCCUGAUUGCUCGCUGCGGCGA | 889 |
| CasPhi32 | GACCACAGGCGCCCUGGCCAGUC | |
| R2928_ | GCUGGGGACCGAUCCUGAUUGCUCGCUGCGGCGA | 890 |
| CasPhi32 | GACUCUGGGCGGUGCUACAACUG | |
| R2929_ | GCUGGGGACCGAUCCUGAUUGCUCGCUGCGGCGA | 891 |
| CasPhi32 | GACGCAUGCCUGGAGCAGCCCCA | |
| R2930_ | GCUGGGGACCGAUCCUGAUUGCUCGCUGCGGCGA | 892 |
| CasPhi32 | GACUAGCACCGCCCAGACGACUG | |
| R2931_ | GCUGGGGACCGAUCCUGAUUGCUCGCUGCGGCGA | 893 |
| CasPhi32 | GACUGGCCGCCAGCCCAGUUGUA | |
| R2932_ | GCUGGGGACCGAUCCUGAUUGCUCGCUGCGGCGA | 894 |
| CasPhi32 | GACCUUCCGCUCACCUCCGCCUG | |
| R2933_ | GCUGGGGACCGAUCCUGAUUGCUCGCUGCGGCGA | 895 |
| CasPhi32 | GACCAGGGCCUGUCUGGGGAGUC | |
| R2934_ | GCUGGGGACCGAUCCUGAUUGCUCGCUGCGGCGA | 896 |
| CasPhi32 | GACUCCCCAGCCCUGCUCGUGGU | |
| R2935_ | GCUGGGGACCGAUCCUGAUUGCUCGCUGCGGCGA | 897 |
| CasPhi32 | GACGGUCACCACGAGCAGGGCUG | |
| R2936_ | GCUGGGGACCGAUCCUGAUUGCUCGCUGCGGCGA | 898 |
| CasPhi32 | GACUCCCCUUCGGUCACCACGAG | |
| R2937_ | GCUGGGGACCGAUCCUGAUUGCUCGCUGCGGCGA | 899 |
| CasPhi32 | GACGAGAAGCUGCAGGUGAAGGU | |
| R2938_ | GCUGGGGACCGAUCCUGAUUGCUCGCUGCGGCGA | 900 |
| CasPhi32 | GACACCUGCAGCUUCUCCAACAC | |
| R2939_ | GCUGGGGACCGAUCCUGAUUGCUCGCUGCGGCGA | 901 |
| CasPhi32 | GACUCCAACACAUCGGAGAGCUU | |
| R2940_ | GCUGGGGACCGAUCCUGAUUGCUCGCUGCGGCGA | 902 |
| CasPhi32 | GACGCACGAAGCUCUCCGAUGUG | |
| R2941_ | GCUGGGGACCGAUCCUGAUUGCUCGCUGCGGCGA | 903 |
| CasPhi32 | GACAGCACGAAGCUCUCCGAUGU | |
| R2942_ | GCUGGGGACCGAUCCUGAUUGCUCGCUGCGGCGA | 904 |
| CasPhi32 | GACGUGCUAAACUGGUACCGCAU | |
| R2943_ | GCUGGGGACCGAUCCUGAUUGCUCGCUGCGGCGA | 905 |
| CasPhi32 | GACCUGGGGCUCAUGCGGUACCA | |
| R2944_ | GCUGGGGACCGAUCCUGAUUGCUCGCUGCGGCGA | 906 |
| CasPhi32 | GACUCCGUCUGGUUGCUGGGGCU | |
| R2945_ | GCUGGGGACCGAUCCUGAUUGCUCGCUGCGGCGA | 907 |
| CasPhi32 | GACCCCGAGGACCGCAGCCAGCC | |
| R2946_ | GCUGGGGACCGAUCCUGAUUGCUCGCUGCGGCGA | 908 |
| CasPhi32 | GACUGUGACACGGAAGCGGCAGU | |
| R2947_ | GCUGGGGACCGAUCCUGAUUGCUCGCUGCGGCGA | 909 |
| CasPhi32 | GACCGUGUCACACAACUGCCCAA | |
| R2948_ | GCUGGGGACCGAUCCUGAUUGCUCGCUGCGGCGA | 910 |
| CasPhi32 | GACGGCAGUUGUGUGACACGGAA | |
| R2949_ | GCUGGGGACCGAUCCUGAUUGCUCGCUGCGGCGA | 911 |
| CasPhi32 | GACCACAUGAGCGUGGUCAGGGC | |
| R2950_ | GCUGGGGACCGAUCCUGAUUGCUCGCUGCGGCGA | 912 |
| CasPhi32 | GACCGCCGGGCCCUGACCACGCU | |
| R2951_ | GCUGGGGACCGAUCCUGAUUGCUCGCUGCGGCGA | 913 |
| CasPhi32 | GACGGGGCCAGGGAGAUGGCCCC | |
| R2952_ | GCUGGGGACCGAUCCUGAUUGCUCGCUGCGGCGA | 914 |
| CasPhi32 | GACAUCUGCGCCUUGGGGGCCAG | |
| R2953_ | GCUGGGGACCGAUCCUGAUUGCUCGCUGCGGCGA | 915 |
| CasPhi32 | GACGAUCUGCGCCUUGGGGGCCA | |
| R2954_ | GCUGGGGACCGAUCCUGAUUGCUCGCUGCGGCGA | 916 |
| CasPhi32 | GACCCAGACAGGCCCUGGAACCC | |
| R2955_ | GCUGGGGACCGAUCCUGAUUGCUCGCUGCGGCGA | 917 |
| CasPhi32 | GACCCAGCCCUGCUCGUGGUGAC | |
| R2956_ | GCUGGGGACCGAUCCUGAUUGCUCGCUGCGGCGA | 918 |
| CasPhi32 | GACUCUCUGGAAGGGCACAAAGG | |
| R2957_ | GCUGGGGACCGAUCCUGAUUGCUCGCUGCGGCGA | 919 |
| CasPhi32 | GACGUGCCCUUCCAGAGAGAAGG | |
| R2958_ | GCUGGGGACCGAUCCUGAUUGCUCGCUGCGGCGA | 920 |
| CasPhi32 | GACUGCCCUUCCAGAGAGAAGGG | |
| R2959_ | GCUGGGGACCGAUCCUGAUUGCUCGCUGCGGCGA | 921 |
| CasPhi32 | GACUGCCCUUCUCUCUGGAAGGG | |
| R2960_ | GCUGGGGACCGAUCCUGAUUGCUCGCUGCGGCGA | 922 |
| CasPhi32 | GACCAGAGAGAAGGGCAGAAGUG | |
| R2961_ | GCUGGGGACCGAUCCUGAUUGCUCGCUGCGGCGA | 923 |
| CasPhi32 | GACGAACUGGCCGGCUGGCCUGG | |
| R2962_ | GCUGGGGACCGAUCCUGAUUGCUCGCUGCGGCGA | 924 |
| CasPhi32 | GACGGAACUGGCCGGCUGGCCUG | |
| R2963_ | GCUGGGGACCGAUCCUGAUUGCUCGCUGCGGCGA | 925 |
| CasPhi32 | GACCAAACCCUGGUGGUUGGUGU | |
| R2964_ | GCUGGGGACCGAUCCUGAUUGCUCGCUGCGGCGA | 926 |
| CasPhi32 | GACGUGUCGUGGGCGGCCUGCUG | |
| R2965_ | GCUGGGGACCGAUCCUGAUUGCUCGCUGCGGCGA | 927 |
| CasPhi32 | GACCCUCGUGCGGCCCGGGAGCA | |
| R2966_ | GCUGGGGACCGAUCCUGAUUGCUCGCUGCGGCGA | 928 |
| CasPhi32 | GACUCCCUGCAGAGAAACACACU | |
| R2967_ | GCUGGGGACCGAUCCUGAUUGCUCGCUGCGGCGA | 929 |
| CasPhi32 | GACCUCUGCAGGGACAAUAGGAG | |
| R2968_ | GCUGGGGACCGAUCCUGAUUGCUCGCUGCGGCGA | 930 |
| CasPhi32 | GACUCUGCAGGGACAAUAGGAGC | |
| R2969_ | GCUGGGGACCGAUCCUGAUUGCUCGCUGCGGCGA | 931 |
| CasPhi32 | GACCUCCUCAAAGAAGGAGGACC | |
| R2970_ | GCUGGGGACCGAUCCUGAUUGCUCGCUGCGGCGA | 932 |
| CasPhi32 | GACUCCUCAAAGAAGGAGGACCC | |
| R2971_ | GCUGGGGACCGAUCCUGAUUGCUCGCUGCGGCGA | 933 |
| CasPhi32 | GACUCUGUGGACUAUGGGGAGCU | |
| R2972_ | GCUGGGGACCGAUCCUGAUUGCUCGCUGCGGCGA | 934 |
| CasPhi32 | GACUCUCGCCACUGGAAAUCCAG | |
| R2973_ | GCUGGGGACCGAUCCUGAUUGCUCGCUGCGGCGA | 935 |
| CasPhi32 | GACCCAGUGGCGAGAGAAGACCC | |
| R2974_ | GCUGGGGACCGAUCCUGAUUGCUCGCUGCGGCGA | 936 |
| CasPhi32 | GACCAGUGGCGAGAGAAGACCCC | |
| R2975_ | GCUGGGGACCGAUCCUGAUUGCUCGCUGCGGCGA | 937 |
| CasPhi32 | GACCGCUAGGAAAGACAAUGGUG | |
| R2976_ | GCUGGGGACCGAUCCUGAUUGCUCGCUGCGGCGA | 938 |
| CasPhi32 | GACUCUUUCCUAGCGGAAUGGGC | |
| R2977_ | GCUGGGGACCGAUCCUGAUUGCUCGCUGCGGCGA | 939 |
| CasPhi32 | GACCCUAGCGGAAUGGGCACCUC | |
| R2978_ | GCUGGGGACCGAUCCUGAUUGCUCGCUGCGGCGA | 940 |
| CasPhi32 | GACCUAGCGGAAUGGGCACCUCA | |
| R2979_ | GCUGGGGACCGAUCCUGAUUGCUCGCUGCGGCGA | 941 |
| CasPhi32 | GACGCCCCUCUGACCGGCUUCCU | |
| R2980_ | GCUGGGGACCGAUCCUGAUUGCUCGCUGCGGCGA | 942 |
| CasPhi32 | GACCUUGGCCACCAGUGUUCUGC | |
| R2981_ | GCUGGGGACCGAUCCUGAUUGCUCGCUGCGGCGA | 943 |
| CasPhi32 | GACGCCACCAGUGUUCUGCAGAC | |
| R2982_ | GCUGGGGACCGAUCCUGAUUGCUCGCUGCGGCGA | 944 |
| CasPhi32 | GACUGCAGACCCUCCACCAUGAG | |
| R2983_ | GCUGGGGACCGAUCCUGAUUGCUCGCUGCGGCGA | 945 |
| CasPhi32 | GACUCCUGAGGAAAUGCGCUGAC | |
| R2984_ | GCUGGGGACCGAUCCUGAUUGCUCGCUGCGGCGA | 946 |
| CasPhi32 | GACCCUCAGGAGAAGCAGGCAGG | |
| R2985_ | GCUGGGGACCGAUCCUGAUUGCUCGCUGCGGCGA | 947 |
| CasPhi32 | GACCUCAGGAGAAGCAGGCAGGG | |
| R2986_ | GCUGGGGACCGAUCCUGAUUGCUCGCUGCGGCGA | 948 |
| CasPhi32 | GACCAGGCCGUCCAGGGGCUGAG | |
| R2987_ | GCUGGGGACCGAUCCUGAUUGCUCGCUGCGGCGA | 949 |
| CasPhi32 | GACAGACAUGAGUCCUGUGGUGG | |
| R2988_ | GCUGGGGACCGAUCCUGAUUGCUCGCUGCGGCGA | 950 |
| CasPhi32 | GACAGGUCCUGCCAGCACAGAGC | |
| R2989_ | GCUGGGGACCGAUCCUGAUUGCUCGCUGCGGCGA | 951 |
| CasPhi32 | GACAGGGAGCUGGACGCAGGCAG | |
| R2990_ | GCUGGGGACCGAUCCUGAUUGCUCGCUGCGGCGA | 952 |
| CasPhi32 | GACAGCCCCGGGCCGCAGGCAGC | |
| R2991_ | GCUGGGGACCGAUCCUGAUUGCUCGCUGCGGCGA | 953 |
| CasPhi32 | GACAGGCAGGAGGCUCCGGGGCG | |
| R2992_ | GCUGGGGACCGAUCCUGAUUGCUCGCUGCGGCGA | 954 |
| CasPhi32 | GACGGGGCUGGUUGGAGAUGGCC | |
| R2993_ | GCUGGGGACCGAUCCUGAUUGCUCGCUGCGGCGA | 955 |
| CasPhi32 | GACGAGAUGGCCUUGGAGCAGCC | |
| R2994_ | GCUGGGGACCGAUCCUGAUUGCUCGCUGCGGCGA | 956 |
| CasPhi32 | GACGCUGCUCCAAGGCCAUCUCC | |
| R2995_ | GCUGGGGACCGAUCCUGAUUGCUCGCUGCGGCGA | 957 |
| CasPhi32 | GACGAGCAGCCAAGGUGCCCCUG | |
| R2996_ | GCUGGGGACCGAUCCUGAUUGCUCGCUGCGGCGA | 958 |
| CasPhi32 | GACGGGAUGCCACUGCCAGGGGC | |
| R2997_ | GCUGGGGACCGAUCCUGAUUGCUCGCUGCGGCGA | 959 |
| CasPhi32 | GACCGGGAUGCCACUGCCAGGGG | |
| R2998_ | GCUGGGGACCGAUCCUGAUUGCUCGCUGCGGCGA | 960 |
| CasPhi32 | GACGGCCCUGCGUCCAGGGCGUU | |
| R2999_ | GCUGGGGACCGAUCCUGAUUGCUCGCUGCGGCGA | 961 |
| CasPhi32 | GACUCUGCUCCCUGCAGGCCUAG | |
| R3000_ | GCUGGGGACCGAUCCUGAUUGCUCGCUGCGGCGA | 962 |
| CasPhi32 | GACUCUAGGCCUGCAGGGAGCAG | |
| R3001_ | GCUGGGGACCGAUCCUGAUUGCUCGCUGCGGCGA | 963 |
| CasPhi32 | GACCCUGAAACUUCUCUAGGCCU | |
| R3002_ | GCUGGGGACCGAUCCUGAUUGCUCGCUGCGGCGA | 964 |
| CasPhi32 | GACUGACCUUCCCUGAAACUUCU | |
| R3003_ | GCUGGGGACCGAUCCUGAUUGCUCGCUGCGGCGA | 965 |
| CasPhi32 | GACCAGGGAAGGUCAGAAGAGCU | |
| R3004_ | GCUGGGGACCGAUCCUGAUUGCUCGCUGCGGCGA | 966 |
| CasPhi32 | GACAGGGAAGGUCAGAAGAGCUC | |
| R3005_ | GCUGGGGACCGAUCCUGAUUGCUCGCUGCGGCGA | 967 |
| CasPhi32 | GACCUGCCCUGCCCACCACAGCC | |
| R3006_ | GCUGGGGACCGAUCCUGAUUGCUCGCUGCGGCGA | 968 |
| CasPhi32 | GACCCUGCCCUGCCCACCACAGC | |
| R3007_ | GCUGGGGACCGAUCCUGAUUGCUCGCUGCGGCGA | 969 |
| CasPhi32 | GACACACAUGCCCAGGCAGCACC | |
| R3008_ | GCUGGGGACCGAUCCUGAUUGCUCGCUGCGGCGA | 970 |
| CasPhi32 | GACCACAUGCCCAGGCAGCACCU | |
| R3009_ | GCUGGGGACCGAUCCUGAUUGCUCGCUGCGGCGA | 971 |
| CasPhi32 | GACCCUGCCCCACAAAGGGCCUG | |
| R3010_ | GCUGGGGACCGAUCCUGAUUGCUCGCUGCGGCGA | 972 |
| CasPhi32 | GACGUGGGGCAGGGAAGCUGAGG | |
| R3011_ | GCUGGGGACCGAUCCUGAUUGCUCGCUGCGGCGA | 973 |
| CasPhi32 | GACUGGGGCAGGGAAGCUGAGGC | |
| R3012_ | GCUGGGGACCGAUCCUGAUUGCUCGCUGCGGCGA | 974 |
| CasPhi32 | GACCUGCCUCAGCUUCCCUGCCC | |
| R3013_ | GCUGGGGACCGAUCCUGAUUGCUCGCUGCGGCGA | 975 |
| CasPhi32 | GACCAGGCCCAGCCAGCACUCUG | |
| R3014_ | GCUGGGGACCGAUCCUGAUUGCUCGCUGCGGCGA | 976 |
| CasPhi32 | GACAGGCCCAGCCAGCACUCUGG | |
| R3015_ | GCUGGGGACCGAUCCUGAUUGCUCGCUGCGGCGA | 977 |
| CasPhi32 | GACCACCCCAGCCCCUCACACCA | |
| R3016_ | GCUGGGGACCGAUCCUGAUUGCUCGCUGCGGCGA | 978 |
| CasPhi32 | GACGGACCGUAGGAUGUCCCUCU | |

TABLE O
CasΦ.12 gRNAs targeting human CIITA

| | | SEQ |
|---|---|---|
| | Repeat + spacer sequence | ID |
| Name | RNA Sequence (5′ → 3′) | NO |
| R4503_CasPhi12_ | CUUUCAAGACUAAUAGAUUGCUCCUUAC | 979 |
| C2TA_T1.1 | GAGGAGACCUACACAAUGCGUUGCCUGG | |
| R4504_CasPhi12_ | CUUUCAAGACUAAUAGAUUGCUCCUUAC | 980 |
| C2TA_T1.2 | GAGGAGACGGGCUCUGACAGGUAGGACC | |
| R4505_CasPhi12_ | CUUUCAAGACUAAUAGAUUGCUCCUUAC | 981 |
| C2TA_T1.3 | GAGGAGACUGUAGGAAUCCCAGCCAGGC | |
| R4506_CasPhi12_ | CUUUCAAGACUAAUAGAUUGCUCCUUAC | 982 |
| C2TA_T1.8 | GAGGAGACCCUGGCUCCACGCCCUGCUG | |
| R4507_CasPhi12_ | CUUUCAAGACUAAUAGAUUGCUCCUUAC | 983 |
| C2TA_T1.9 | GAGGAGACGGGAAGCUGAGGGCACGAGG | |
| R4508_CasPhi12_ | CUUUCAAGACUAAUAGAUUGCUCCUUAC | 984 |
| C2TA_T2.1 | GAGGAGACACAGCGAUGCUGACCCCCUG | |
| R4509_CasPhi12_ | CUUUCAAGACUAAUAGAUUGCUCCUUAC | 985 |
| C2TA_T2.2 | GAGGAGACUUAACAGCGAUGCUGACCCC | |
| R4510_CasPhi12_ | CUUUCAAGACUAAUAGAUUGCUCCUUAC | 986 |
| C2TA_T2.3 | GAGGAGACUAUGACCAGAUGGACCUGGC | |
| R4511_CasPhi12_ | CUUUCAAGACUAAUAGAUUGCUCCUUAC | 987 |
| C2TA_T2.4 | GAGGAGACGGGCCCCUAGAAGGUGGCUA | |
| R4512_CasPhi12_ | CUUUCAAGACUAAUAGAUUGCUCCUUAC | 988 |
| C2TA_T2.5 | GAGGAGACUAGGGGCCCCAACUCCAUGG | |
| R4513_CasPhi12_ | CUUUCAAGACUAAUAGAUUGCUCCUUAC | 989 |
| C2TA_T2.6 | GAGGAGACAGAAGCUCCAGGUAGCCACC | |
| R4514_CasPhi12_ | CUUUCAAGACUAAUAGAUUGCUCCUUAC | 990 |
| C2TA_T2.7 | GAGGAGACUCCAGCCAGGUCCAUCUGGU | |
| R4515_CasPhi12_ | CUUUCAAGACUAAUAGAUUGCUCCUUAC | 991 |
| C2TA_T2.8 | GAGGAGACUUCUCCAGCCAGGUCCAUCU | |
| R5200_CasPhi12 | CUUUCAAGACUAAUAGAUUGCUCCUUAC | 2112 |
| | GAGGAGACAGCAGGCUGUUGUGUGACAU | |
| R5201_CasPhi12 | CUUUCAAGACUAAUAGAUUGCUCCUUAC | 2113 |
| | GAGGAGACCAUGUCACACAACAGCCUGC | |
| R5202_CasPhi12 | CUUUCAAGACUAAUAGAUUGCUCCUUAC | 2114 |
| | GAGGAGACUGUGACAUGGAAGGUGAUGA | |
| R5203_CasPhi12 | CUUUCAAGACUAAUAGAUUGCUCCUUAC | 2115 |
| | GAGGAGACAUCACCUUCCAUGUCACACA | |
| R5204_CasPhi12 | CUUUCAAGACUAAUAGAUUGCUCCUUAC | 2116 |
| | GAGGAGACGCAUAAGCCUCCCUGGUCUC | |
| R5205_CasPhi12 | CUUUCAAGACUAAUAGAUUGCUCCUUAC | 2117 |
| | GAGGAGACCAGGACUCCCAGCUGGAGGG | |
| R5206_CasPhi12 | CUUUCAAGACUAAUAGAUUGCUCCUUAC | 2118 |
| | GAGGAGACCUCAGGCCCUCCAGCUGGGA | |
| R5207_CasPhi12 | CUUUCAAGACUAAUAGAUUGCUCCUUAC | 2119 |
| | GAGGAGACUGCUGGCAUCUCCAUACUCU | |
| R5208_CasPhi12 | CUUUCAAGACUAAUAGAUUGCUCCUUAC | 2120 |
| | GAGGAGACUGCCCAACUUCUGCUGGCAU | |
| R5209_CasPhi12 | CUUUCAAGACUAAUAGAUUGCUCCUUAC | 2121 |
| | GAGGAGACCUGCCCAACUUCUGCUGGCA | |
| R5210_CasPhi12 | CUUUCAAGACUAAUAGAUUGCUCCUUAC | 2122 |
| | GAGGAGACUCUGCCCAACUUCUGCUGGC | |
| R5211_CasPhi12 | CUUUCAAGACUAAUAGAUUGCUCCUUAC | 2123 |
| | GAGGAGACUGACUUUUCUGCCCAACUUC | |
| R5212_CasPhi12 | CUUUCAAGACUAAUAGAUUGCUCCUUAC | 2124 |
| | GAGGAGACCUGACUUUUCUGCCCAACUU | |
| R5213_CasPhi12 | CUUUCAAGACUAAUAGAUUGCUCCUUAC | 2125 |
| | GAGGAGACUCUGACUUUUCUGCCCAACU | |
| R5214_CasPhi12 | CUUUCAAGACUAAUAGAUUGCUCCUUAC | 2126 |
| | GAGGAGACCCAGAGGAGCUUCCGGCAGA | |
| R5215_CasPhi12 | CUUUCAAGACUAAUAGAUUGCUCCUUAC | 2127 |
| | GAGGAGACAGGUCUGCCGGAAGCUCCUC | |
| R5216_CasPhi12 | CUUUCAAGACUAAUAGAUUGCUCCUUAC | 2128 |
| | GAGGAGACCGGCAGACCUGAAGCACUGG | |
| R5217_CasPhi12 | CUUUCAAGACUAAUAGAUUGCUCCUUAC | 2129 |
| | GAGGAGACCAGUGCUUCAGGUCUGCCGG | |
| R5218_CasPhi12 | CUUUCAAGACUAAUAGAUUGCUCCUUAC | 2130 |
| | GAGGAGACAACAGCGCAGGCAGUGGCAG | |
| R5219_CasPhi12 | CUUUCAAGACUAAUAGAUUGCUCCUUAC | 2131 |
| | GAGGAGACAACCAGGAGCCAGCCUCCGG | |
| R5220_CasPhi12 | CUUUCAAGACUAAUAGAUUGCUCCUUAC | 2132 |
| | GAGGAGACUCCAGGCGCAUCUGGCCGGA | |
| R5221_CasPhi12 | CUUUCAAGACUAAUAGAUUGCUCCUUAC | 2133 |
| | GAGGAGACCUCCAGGCGCAUCUGGCCGG | |
| R5222_CasPhi12 | CUUUCAAGACUAAUAGAUUGCUCCUUAC | 2134 |
| | GAGGAGACUCUCCAGGCGCAUCUGGCCG | |
| R5223_CasPhi12 | CUUUCAAGACUAAUAGAUUGCUCCUUAC | 2135 |
| | GAGGAGACCUCCAGUUCCUCGUUGAGCU | |
| R5224_CasPhi12 | CUUUCAAGACUAAUAGAUUGCUCCUUAC | 2136 |
| | GAGGAGACUCCAGUUCCUCGUUGAGCUG | |
| R5225_CasPhi12 | CUUUCAAGACUAAUAGAUUGCUCCUUAC | 2137 |
| | GAGGAGACAGGCAGCUCAACGAGGAACU | |
| R5226_CasPhi12 | CUUUCAAGACUAAUAGAUUGCUCCUUAC | 2138 |
| | GAGGAGACCUCGUUGAGCUGCCUGAAUC | |
| R5227_CasPhi12 | CUUUCAAGACUAAUAGAUUGCUCCUUAC | 2139 |
| | GAGGAGACAGCUGCCUGAAUCUCCCUGA | |
| R5228_CasPhi12 | CUUUCAAGACUAAUAGAUUGCUCCUUAC | 2140 |
| | GAGGAGACGUCCCCACCAUCUCCACUCU | |
| R5229_CasPhi12 | CUUUCAAGACUAAUAGAUUGCUCCUUAC | 2141 |
| | GAGGAGACUCCCCACCAUCUCCACUCUG | |
| R5230_CasPhi12 | CUUUCAAGACUAAUAGAUUGCUCCUUAC | 2142 |
| | GAGGAGACCCAGAGCCCAUGGGGCAGAG | |
| R5231_CasPhi12 | CUUUCAAGACUAAUAGAUUGCUCCUUAC | 2143 |
| | GAGGAGACGCCAGAGCCCAUGGGGCAGA | |
| R5232_CasPhi12 | CUUUCAAGACUAAUAGAUUGCUCCUUAC | 2144 |
| | GAGGAGACCAGCCUCAGAGAUUUGCCAG | |
| R5233_CasPhi12 | CUUUCAAGACUAAUAGAUUGCUCCUUAC | 2145 |
| | GAGGAGACGGAGGCCGUGGACAGUGAAU | |
| R5234_CasPhi12 | CUUUCAAGACUAAUAGAUUGCUCCUUAC | 2146 |
| | GAGGAGACACUGUCCACGGCCUCCCAAC | |
| R5235_CasPhi12 | CUUUCAAGACUAAUAGAUUGCUCCUUAC | 2147 |
| | GAGGAGACGCUCCAUCAGCCACUGACCU | |
| R5236_CasPhi12 | CUUUCAAGACUAAUAGAUUGCUCCUUAC | 2148 |
| | GAGGAGACAGGCAUGCUGGGCAGGUCAG | |
| R5237_CasPhi12 | CUUUCAAGACUAAUAGAUUGCUCCUUAC | 2149 |
| | GAGGAGACCUCGGGAGGUCAGGGCAGGU | |
| R5238_CasPhi12 | CUUUCAAGACUAAUAGAUUGCUCCUUAC | 2150 |
| | GAGGAGACGCUCGGGAGGUCAGGGCAGG | |
| R5239_CasPhi12 | CUUUCAAGACUAAUAGAUUGCUCCUUAC | 2151 |
| | GAGGAGACGAGACCUCUCCAGCUGCCGG | |
| R5240_CasPhi12 | CUUUCAAGACUAAUAGAUUGCUCCUUAC | 2152 |
| | GAGGAGACUUGGAGACCUCUCCAGCUGC | |
| R5241_CasPhi12 | CUUUCAAGACUAAUAGAUUGCUCCUUAC | 2153 |
| | GAGGAGACGAAGCUUGUUGGAGACCUCU | |
| R5242_CasPhi12 | CUUUCAAGACUAAUAGAUUGCUCCUUAC | 2154 |
| | GAGGAGACGGAAGCUUGUUGGAGACCUC | |
| R5243_CasPhi12 | CUUUCAAGACUAAUAGAUUGCUCCUUAC | 2155 |
| | GAGGAGACUGGAAGCUUGUUGGAGACCU | |
| R5244_CasPhi12 | CUUUCAAGACUAAUAGAUUGCUCCUUAC | 2156 |
| | GAGGAGACUACCGCUCACUGCAGGACAC | |
| R5245_CasPhi12 | CUUUCAAGACUAAUAGAUUGCUCCUUAC | 2157 |
| | GAGGAGACCUGCUGCUCCUCUCCAGCCU | |
| R5246_CasPhi12 | CUUUCAAGACUAAUAGAUUGCUCCUUAC | 2158 |
| | GAGGAGACCCGCUCCAGGCUCUUGCUGC | |
| R5247_CasPhi12 | CUUUCAAGACUAAUAGAUUGCUCCUUAC | 2159 |
| | GAGGAGACUGCCCAGUCCGGGGUGGCCA | |
| R5248_CasPhi12 | CUUUCAAGACUAAUAGAUUGCUCCUUAC | 2160 |
| | GAGGAGACGGCCAGCUGCCGUUCUGCCC | |
| R5249_CasPhi12 | CUUUCAAGACUAAUAGAUUGCUCCUUAC | 2161 |
| | GAGGAGACGCAGCCAACAGCACCUCAGC | |
| R5250_CasPhi12 | CUUUCAAGACUAAUAGAUUGCUCCUUAC | 2162 |
| | GAGGAGACGCUGCCAAGGAGCACCGGCG | |
| R5251_CasPhi12 | CUUUCAAGACUAAUAGAUUGCUCCUUAC | 2163 |
| | GAGGAGACCCCAGCACAGCAAUCACUCG | |
| R5252_CasPhi12 | CUUUCAAGACUAAUAGAUUGCUCCUUAC | 2164 |
| | GAGGAGACGCCCAGCACAGCAAUCACUC | |
| R5253_CasPhi12 | CUUUCAAGACUAAUAGAUUGCUCCUUAC | 2165 |
| | GAGGAGACCUGUGCUGGGCAAAGCUGGU | |
| R5254_CasPhi12 | CUUUCAAGACUAAUAGAUUGCUCCUUAC | 2166 |
| | GAGGAGACCCCUGACCAGCUUUGCCCAG | |
| R5255_CasPhi12 | CUUUCAAGACUAAUAGAUUGCUCCUUAC | 2167 |
| | GAGGAGACGGCUGGGGCAGUGAGCCGGG | |
| R5256_CasPhi12 | CUUUCAAGACUAAUAGAUUGCUCCUUAC | 2168 |
| | GAGGAGACUGGCCGGCUUCCCCAGUACG | |
| R5257_CasPhi12 | CUUUCAAGACUAAUAGAUUGCUCCUUAC | 2169 |
| | GAGGAGACCCCAGUACGACUUUGUCUUC | |
| R5258_CasPhi12 | CUUUCAAGACUAAUAGAUUGCUCCUUAC | 2170 |
| | GAGGAGACGUCUUCUCUGUCCCCUGCCA | |
| R5259_CasPhi12 | CUUUCAAGACUAAUAGAUUGCUCCUUAC | 2171 |
| | GAGGAGACUCUUCUCUGUCCCCUGCCAU | |
| R5260_CasPhi12 | CUUUCAAGACUAAUAGAUUGCUCCUUAC | 2172 |
| | GAGGAGACUCUGUCCCCUGCCAUUGCUU | |
| R5261_CasPhi12 | CUUUCAAGACUAAUAGAUUGCUCCUUAC | 2173 |
| | GAGGAGACAAGCAAUGGCAGGGGACAGA | |
| R5262_CasPhi12 | CUUUCAAGACUAAUAGAUUGCUCCUUAC | 2174 |
| | GAGGAGACCUUGAACCGUCCGGGGGAUG | |
| R5263_CasPhi12 | CUUUCAAGACUAAUAGAUUGCUCCUUAC | 2175 |
| | GAGGAGACAACCGUCCGGGGGAUGCCUA | |
| R5264_CasPhi12 | CUUUCAAGACUAAUAGAUUGCUCCUUAC | 2176 |
| | GAGGAGACUCCCUGGGCCCACAGCCACU | |
| R5265_CasPhi12 | CUUUCAAGACUAAUAGAUUGCUCCUUAC | 2177 |
| | GAGGAGACAAGAUGUGGCUGAAAACCUC | |
| R5266_CasPhi12 | CUUUCAAGACUAAUAGAUUGCUCCUUAC | 2178 |
| | GAGGAGACUCAGCCACAUCUUGAAGAGA | |
| R5267_CasPhi12 | CUUUCAAGACUAAUAGAUUGCUCCUUAC | 2179 |
| | GAGGAGACCAGCCACAUCUUGAAGAGAC | |
| R5268_CasPhi12 | CUUUCAAGACUAAUAGAUUGCUCCUUAC | 2180 |
| | GAGGAGACAGCCACAUCUUGAAGAGACC | |
| R5269_CasPhi12 | CUUUCAAGACUAAUAGAUUGCUCCUUAC | 2181 |
| | GAGGAGACAAGAGACCUGACCGCGUUCU | |
| R5270_CasPhi12 | CUUUCAAGACUAAUAGAUUGCUCCUUAC | 2182 |
| | GAGGAGACUGCUCAUCCUAGACGGCUUC | |
| R5271_CasPhi12 | CUUUCAAGACUAAUAGAUUGCUCCUUAC | 2183 |
| | GAGGAGACCAGCUCCUCGAAGCCGUCUA | |
| R5272_CasPhi12 | CUUUCAAGACUAAUAGAUUGCUCCUUAC | 2184 |
| | GAGGAGACCGCUUCCAGCUCCUCGAAGC | |
| R5273_CasPhi12 | CUUUCAAGACUAAUAGAUUGCUCCUUAC | 2185 |
| | GAGGAGACGAGGAGCUGGAAGCGCAAGA | |
| R5274_CasPhi12 | CUUUCAAGACUAAUAGAUUGCUCCUUAC | 2186 |
| | GAGGAGACCUGCACAGCACGUGCGGACC | |
| R5275_CasPhi12 | CUUUCAAGACUAAUAGAUUGCUCCUUAC | 2187 |
| | GAGGAGACUGGAAAAGGCCGGCCAGCAG | |
| R5276_CasPhi12 | CUUUCAAGACUAAUAGAUUGCUCCUUAC | 2188 |
| | GAGGAGACUUCUGGAAAAGGCCGGCCAG | |
| R5277_CasPhi12 | CUUUCAAGACUAAUAGAUUGCUCCUUAC | 2189 |
| | GAGGAGACUCCAGAAGAAGCUGCUCCGA | |
| R5278_CasPhi12 | CUUUCAAGACUAAUAGAUUGCUCCUUAC | 2190 |
| | GAGGAGACCCAGAAGAAGCUGCUCCGAG | |
| R5279_CasPhi12 | CUUUCAAGACUAAUAGAUUGCUCCUUAC | 2191 |
| | GAGGAGACCAGAAGAAGCUGCUCCGAGG | |
| R5280_CasPhi12 | CUUUCAAGACUAAUAGAUUGCUCCUUAC | 2192 |
| | GAGGAGACCACCCUCCUCCUCACAGCCC | |
| R5281_CasPhi12 | CUUUCAAGACUAAUAGAUUGCUCCUUAC | 2193 |
| | GAGGAGACCUCAGGCUCUGGACCAGGCG | |
| R5282_CasPhi12 | CUUUCAAGACUAAUAGAUUGCUCCUUAC | 2194 |
| | GAGGAGACGAGCUGUCCGGCUUCUCCAU | |
| R5283_CasPhi12 | CUUUCAAGACUAAUAGAUUGCUCCUUAC | 2195 |
| | GAGGAGACAGCUGUCCGGCUUCUCCAUG | |
| R5284_CasPhi12 | CUUUCAAGACUAAUAGAUUGCUCCUUAC | 2196 |
| | GAGGAGACUCCAUGGAGCAGGCCCAGGC | |
| R5285_CasPhi12 | CUUUCAAGACUAAUAGAUUGCUCCUUAC | 2197 |
| | GAGGAGACGAGAGCUCAGGGAUGACAGA | |
| R5286_CasPhi12 | CUUUCAAGACUAAUAGAUUGCUCCUUAC | 2198 |
| | GAGGAGACAGAGCUCAGGGAUGACAGAG | |
| R5287_CasPhi12 | CUUUCAAGACUAAUAGAUUGCUCCUUAC | 2199 |
| | GAGGAGACGUGCUCUGUCAUCCCUGAGC | |
| R5288_CasPhi12 | CUUUCAAGACUAAUAGAUUGCUCCUUAC | 2200 |
| | GAGGAGACUUCUCAGUCACAGCCACAGC | |
| R5289_CasPhi12 | CUUUCAAGACUAAUAGAUUGCUCCUUAC | 2201 |
| | GAGGAGACUCAGUCACAGCCACAGCCCU | |
| R5290_CasPhi12 | CUUUCAAGACUAAUAGAUUGCUCCUUAC | 2202 |
| | GAGGAGACGUGCCGGGCAGUGUGCCAGC | |
| R5291_CasPhi12 | CUUUCAAGACUAAUAGAUUGCUCCUUAC | 2203 |
| | GAGGAGACUGCCGGGCAGUGUGCCAGCU | |
| R5292_CasPhi12 | CUUUCAAGACUAAUAGAUUGCUCCUUAC | 2204 |
| | GAGGAGACGCGUCCUCCCCAAGCUCCAG | |
| R5293_CasPhi12 | CUUUCAAGACUAAUAGAUUGCUCCUUAC | 2205 |
| | GAGGAGACGGGAGGACGCCAAGCUGCCC | |
| R5294_CasPhi12 | CUUUCAAGACUAAUAGAUUGCUCCUUAC | 2206 |
| | GAGGAGACGCCAGCUCUGCCAGGGCCCC | |
| R5295_CasPhi12 | CUUUCAAGACUAAUAGAUUGCUCCUUAC | 2207 |
| | GAGGAGACAUGUCUGCGGCCCAGCUCCC | |
| R5392_CasPhi12 | CUUUCAAGACUAAUAGAUUGCUCCUUAC | 2208 |
| | GAGGAGACGAUGUCUGCGGCCCAGCUCC | |
| R5393_CasPhi12 | CUUUCAAGACUAAUAGAUUGCUCCUUAC | 2209 |
| | GAGGAGACCCAUCCGCAGACGUGAGGAC | |
| R5394_CasPhi12 | CUUUCAAGACUAAUAGAUUGCUCCUUAC | 2210 |
| | GAGGAGACGCCAUCGCCCAGGUCCUCAC | |
| R5395_CasPhi12 | CUUUCAAGACUAAUAGAUUGCUCCUUAC | 2211 |
| | GAGGAGACGGCCAUCGCCCAGGUCCUCA | |
| R5396_CasPhi12 | CUUUCAAGACUAAUAGAUUGCUCCUUAC | 2212 |
| | GAGGAGACGACUAAGCCUUUGGCCAUCG | |
| R5397_CasPhi12 | CUUUCAAGACUAAUAGAUUGCUCCUUAC | 2213 |
| | GAGGAGACGUCCAACACCCACCGCGGGC | |
| R5398_CasPhi12 | CUUUCAAGACUAAUAGAUUGCUCCUUAC | 2214 |
| | GAGGAGACCAGGAGGAAGCUGGGGAAGG | |
| R5399_CasPhi12 | CUUUCAAGACUAAUAGAUUGCUCCUUAC | 2215 |
| | GAGGAGACCCCAGCUUCCUCCUGCAAUG | |
| R5400_CasPhi12 | CUUUCAAGACUAAUAGAUUGCUCCUUAC | 2216 |
| | GAGGAGACCUCCUGCAAUGCUUCCUGGG | |
| R5401_CasPhi12 | CUUUCAAGACUAAUAGAUUGCUCCUUAC | 2217 |
| | GAGGAGACCUGGGGGCCCUGUGGCUGGC | |
| R5402_CasPhi12 | CUUUCAAGACUAAUAGAUUGCUCCUUAC | 2218 |
| | GAGGAGACGCCACUCAGAGCCAGCCACA | |
| R5403_CasPhi12 | CUUUCAAGACUAAUAGAUUGCUCCUUAC | 2219 |
| | GAGGAGACCGCCACUCAGAGCCAGCCAC | |
| R5404_CasPhi12 | CUUUCAAGACUAAUAGAUUGCUCCUUAC | 2220 |
| | GAGGAGACAUUUCGCCACUCAGAGCCAG | |
| R5405_CasPhi12 | CUUUCAAGACUAAUAGAUUGCUCCUUAC | 2221 |
| | GAGGAGACUCCUUGAUUUCGCCACUCAG | |
| R5406_CasPhi12 | CUUUCAAGACUAAUAGAUUGCUCCUUAC | 2222 |
| | GAGGAGACGGGUCAAUGCUAGGUACUGC | |
| R5407_CasPhi12 | CUUUCAAGACUAAUAGAUUGCUCCUUAC | 2223 |
| | GAGGAGACCUUGGGGUCAAUGCUAGGUA | |
| R5408_CasPhi12 | CUUUCAAGACUAAUAGAUUGCUCCUUAC | 2224 |
| | GAGGAGACUUCCUUGGGGUCAAUGCUAG | |
| R5409_CasPhi12 | CUUUCAAGACUAAUAGAUUGCUCCUUAC | 2225 |
| | GAGGAGACACCCCAAGGAAGAAGAGGCC | |
| R5410_CasPhi12 | CUUUCAAGACUAAUAGAUUGCUCCUUAC | 2226 |
| | GAGGAGACUCAUAGGGCCUCUUCUUCCU | |
| R5411_CasPhi12 | CUUUCAAGACUAAUAGAUUGCUCCUUAC | 2227 |
| | GAGGAGACCUGGCUGGGCUGAUCUUCCA | |
| R5412_CasPhi12 | CUUUCAAGACUAAUAGAUUGCUCCUUAC | 2228 |
| | GAGGAGACUGGCUGGGCUGAUCUUCCAG | |
| R5413_CasPhi12 | CUUUCAAGACUAAUAGAUUGCUCCUUAC | 2229 |
| | GAGGAGACCAGCCUCCCGCCCGCUGCCU | |
| R5414_CasPhi12 | CUUUCAAGACUAAUAGAUUGCUCCUUAC | 2230 |
| | GAGGAGACCUGUCCACCGAGGCAGCCGC | |
| R5415_CasPhi12 | CUUUCAAGACUAAUAGAUUGCUCCUUAC | 2231 |
| | GAGGAGACUGCUUCCUGUCCACCGAGGC | |
| R5416_CasPhi12 | CUUUCAAGACUAAUAGAUUGCUCCUUAC | 2232 |
| | GAGGAGACAGGUACCUCGCAAGCACCUU | |
| R5417_CasPhi12 | CUUUCAAGACUAAUAGAUUGCUCCUUAC | 2233 |
| | GAGGAGACCGAGGUACCUGAAGCGGCUG | |
| R5418_CasPhi12 | CUUUCAAGACUAAUAGAUUGCUCCUUAC | 2234 |
| | GAGGAGACCAGCCUCCUCGGCCUCGUGG | |
| R5419_CasPhi12 | CUUUCAAGACUAAUAGAUUGCUCCUUAC | 2235 |
| | GAGGAGACGGCAGCACGUGGUACAGGAG | |
| R5420_CasPhi12 | CUUUCAAGACUAAUAGAUUGCUCCUUAC | 2236 |
| | GAGGAGACGCAGCACGUGGUACAGGAGC | |
| R5421_CasPhi12 | CUUUCAAGACUAAUAGAUUGCUCCUUAC | 2237 |
| | GAGGAGACUCUGGGCACCCGCCUCACGC | |
| R5422_CasPhi12 | CUUUCAAGACUAAUAGAUUGCUCCUUAC | 2238 |
| | GAGGAGACCUGGGCACCCGCCUCACGCC | |
| R5423_CasPhi12 | CUUUCAAGACUAAUAGAUUGCUCCUUAC | 2239 |
| | GAGGAGACUGGGCACCCGCCUCACGCCU | |
| R5424_CasPhi12 | CUUUCAAGACUAAUAGAUUGCUCCUUAC | 2240 |
| | GAGGAGACCCCAGUACAUGUGCAUCAGG | |
| R5425_CasPhi12 | CUUUCAAGACUAAUAGAUUGCUCCUUAC | 2241 |
| | GAGGAGACGCCCGCCGCCUCCAAGGCCU | |
| R5426_CasPhi12 | CUUUCAAGACUAAUAGAUUGCUCCUUAC | 2242 |
| | GAGGAGACGAGGCGGCGGGCCAAGACUU | |
| R5427_CasPhi12 | CUUUCAAGACUAAUAGAUUGCUCCUUAC | 2243 |
| | GAGGAGACUCCCUGGACCUCCGCAGCAC | |
| R5428_CasPhi12 | CUUUCAAGACUAAUAGAUUGCUCCUUAC | 2244 |
| | GAGGAGACGCCCCUCUGGAUUGGGGAGC | |
| R5429_CasPhi12 | CUUUCAAGACUAAUAGAUUGCUCCUUAC | 2245 |
| | GAGGAGACCCCCUCUGGAUUGGGGAGCC | |
| R5430_CasPhi12 | CUUUCAAGACUAAUAGAUUGCUCCUUAC | 2246 |
| | GAGGAGACGGGAGCCUCGUGGGACUCAG | |
| R5431_CasPhi12 | CUUUCAAGACUAAUAGAUUGCUCCUUAC | 2247 |
| | GAGGAGACGUCUCCCCAUGCUGCUGCAG | |
| R5432_CasPhi12 | CUUUCAAGACUAAUAGAUUGCUCCUUAC | 2248 |
| | GAGGAGACUCCUCUGCUGCCUGAAGUAG | |
| R5433_CasPhi12 | CUUUCAAGACUAAUAGAUUGCUCCUUAC | 2249 |
| | GAGGAGACAGGCAGCAGAGGAGAAGUUC | |
| R5434_CasPhi12 | CUUUCAAGACUAAUAGAUUGCUCCUUAC | 2250 |
| | GAGGAGACAAAGGCUCGAUGGUGAACUU | |
| R5435_CasPhi12 | CUUUCAAGACUAAUAGAUUGCUCCUUAC | 2251 |
| | GAGGAGACGAAAGGCUCGAUGGUGAACU | |
| R5436_CasPhi12 | CUUUCAAGACUAAUAGAUUGCUCCUUAC | 2252 |
| | GAGGAGACACCAUCGAGCCUUUCAAAGC | |
| R5437_CasPhi12 | CUUUCAAGACUAAUAGAUUGCUCCUUAC | 2253 |
| | GAGGAGACGCUUUGAAAGGCUCGAUGGU | |
| R5438_CasPhi12 | CUUUCAAGACUAAUAGAUUGCUCCUUAC | 2254 |
| | GAGGAGACAGGGACUUGGCUUUGAAAGG | |
| R5439_CasPhi12 | CUUUCAAGACUAAUAGAUUGCUCCUUAC | 2255 |
| | GAGGAGACCAAAGCCAAGUCCCUGAAGG | |
| R5440_CasPhi12 | CUUUCAAGACUAAUAGAUUGCUCCUUAC | 2256 |
| | GAGGAGACAAAGCCAAGUCCCUGAAGGA | |
| R5441_CasPhi12 | CUUUCAAGACUAAUAGAUUGCUCCUUAC | 2257 |
| | GAGGAGACCACAUCCUUCAGGGACUUGG | |
| R5442_CasPhi12 | CUUUCAAGACUAAUAGAUUGCUCCUUAC | 2258 |
| | GAGGAGACCCAGGUCUUCCACAUCCUUC | |
| R5443_CasPhi12 | CUUUCAAGACUAAUAGAUUGCUCCUUAC | 2259 |
| | GAGGAGACCCCAGGUCUUCCACAUCCUU | |
| R5444_CasPhi12 | CUUUCAAGACUAAUAGAUUGCUCCUUAC | 2260 |
| | GAGGAGACCUCGGAAGACACAGCUGGGG | |
| R5445_CasPhi12 | CUUUCAAGACUAAUAGAUUGCUCCUUAC | 2261 |
| | GAGGAGACGGUCCCGAACAGCAGGGAGC | |
| R5446_CasPhi12 | CUUUCAAGACUAAUAGAUUGCUCCUUAC | 2262 |
| | GAGGAGACAGGUCCCGAACAGCAGGGAG | |
| R5447_CasPhi12 | CUUUCAAGACUAAUAGAUUGCUCCUUAC | 2263 |
| | GAGGAGACUUUAGGUCCCGAACAGCAGG | |
| R5448_CasPhi12 | CUUUCAAGACUAAUAGAUUGCUCCUUAC | 2264 |
| | GAGGAGACCUUUAGGUCCCGAACAGCAG | |
| R5449_CasPhi12 | CUUUCAAGACUAAUAGAUUGCUCCUUAC | 2265 |
| | GAGGAGACGGGACCUAAAGAAACUGGAG | |
| R5450_CasPhi12 | CUUUCAAGACUAAUAGAUUGCUCCUUAC | 2266 |
| | GAGGAGACGGGAAAGCCUGGGGGCCUGA | |
| R5451_CasPhi12 | CUUUCAAGACUAAUAGAUUGCUCCUUAC | 2267 |
| | GAGGAGACGGGGAAAGCCUGGGGGCCUG | |
| R5452_CasPhi12 | CUUUCAAGACUAAUAGAUUGCUCCUUAC | 2268 |
| | GAGGAGACCCCCAAACUGGUGCGGAUCC | |
| R5453_CasPhi12 | CUUUCAAGACUAAUAGAUUGCUCCUUAC | 2269 |
| | GAGGAGACCCCAAACUGGUGCGGAUCCU | |
| R5454_CasPhi12 | CUUUCAAGACUAAUAGAUUGCUCCUUAC | 2270 |
| | GAGGAGACUUCUCACUCAGCGCAUCCAG | |
| R5455_CasPhi12 | CUUUCAAGACUAAUAGAUUGCUCCUUAC | 2271 |
| | GAGGAGACAGCUGGGGGAAGGUGGCUGA | |
| R5456_CasPhi12 | CUUUCAAGACUAAUAGAUUGCUCCUUAC | 2272 |
| | GAGGAGACCCCCAGCUGAAGUCCUUGGA | |
| R5457_CasPhi12 | CUUUCAAGACUAAUAGAUUGCUCCUUAC | 2273 |
| | GAGGAGACCAAGGACUUCAGCUGGGGGA | |
| R5458_CasPhi12 | CUUUCAAGACUAAUAGAUUGCUCCUUAC | 2274 |
| | GAGGAGACCCAAGGACUUCAGCUGGGGG | |
| R5459_CasPhi12 | CUUUCAAGACUAAUAGAUUGCUCCUUAC | 2275 |
| | GAGGAGACAGGGUUUCCAAGGACUUCAG | |
| R5460_CasPhi12 | CUUUCAAGACUAAUAGAUUGCUCCUUAC | 2276 |
| | GAGGAGACUAGGCACCCAGGUCAGUGAU | |
| R5461_CasPhi12 | CUUUCAAGACUAAUAGAUUGCUCCUUAC | 2277 |
| | GAGGAGACGUAGGCACCCAGGUCAGUGA | |
| R5462_CasPhi12 | CUUUCAAGACUAAUAGAUUGCUCCUUAC | 2278 |
| | GAGGAGACGCUCGCUGCAUCCCUGCUCA | |
| R5463_CasPhi12 | CUUUCAAGACUAAUAGAUUGCUCCUUAC | 2279 |
| | GAGGAGACGCCUGAGCAGGGAUGCAGCG | |
| R5464_CasPhi12 | CUUUCAAGACUAAUAGAUUGCUCCUUAC | 2280 |
| | GAGGAGACUACAAUAACUGCAUCUGCGA | |
| R5465_CasPhi12 | CUUUCAAGACUAAUAGAUUGCUCCUUAC | 2281 |
| | GAGGAGACGCUCGUGUGCUUCCGGACAU | |
| R5466_CasPhi12 | CUUUCAAGACUAAUAGAUUGCUCCUUAC | 2282 |
| | GAGGAGACCGGACAUGGUGUCCCUCCGG | |
| R5467_CasPhi12 | CUUUCAAGACUAAUAGAUUGCUCCUUAC | 2283 |
| | GAGGAGACACGGCUGCCGGGGCCCAGCA | |
| R5468_CasPhi12 | CUUUCAAGACUAAUAGAUUGCUCCUUAC | 2284 |
| | GAGGAGACGGAGGUGUCCUCAUGUGGAG | |
| R5469_CasPhi12 | CUUUCAAGACUAAUAGAUUGCUCCUUAC | 2285 |
| | GAGGAGACCUGGACACUGAAUGGGAUGG | |
| R5470_CasPhi12 | CUUUCAAGACUAAUAGAUUGCUCCUUAC | 2286 |
| | GAGGAGACAGUGUCCAGGAACACCUGCA | |
| R5471_CasPhi12 | CUUUCAAGACUAAUAGAUUGCUCCUUAC | 2287 |
| | GAGGAGACCAGGUGUUCCUGGACACUGA | |
| R5472_CasPhi12 | CUUUCAAGACUAAUAGAUUGCUCCUUAC | 2288 |
| | GAGGAGACUUGCAGGUGUUCCUGGACAC | |
| R5473_CasPhi12 | CUUUCAAGACUAAUAGAUUGCUCCUUAC | 2289 |
| | GAGGAGACACGGAUCAGCCUGAGAUGAU | |

TABLE P
CasΦ.32 gRNAs targeting human CIITA

| | | SEQ |
|---|---|---|
| | Repeat + spacer sequence | ID |
| Name | RNA Sequence (5′ → 3′) | NO |
| R4503_ | GCUGGGGACCGAUCCUGAUUGCUCGCUGCGGCG | 992 |
| CasPhi32_ | AGACCUACACAAUGCGUUGCCUGG | |
| C2TA_T1.1 | | |
| R4504_ | GCUGGGGACCGAUCCUGAUUGCUCGCUGCGGCG | 993 |
| CasPhi32_ | AGACGGGCUCUGACAGGUAGGACC | |
| C2TA_T1.2 | | |
| R4505_ | GCUGGGGACCGAUCCUGAUUGCUCGCUGCGGCG | 994 |
| CasPhi32_ | AGACUGUAGGAAUCCCAGCCAGGC | |
| C2TA_T1.3 | | |
| R4506_ | GCUGGGGACCGAUCCUGAUUGCUCGCUGCGGCG | 995 |
| CasPhi32_ | AGACCCUGGCUCCACGCCCUGCUG | |
| C2TA_T1.8 | | |
| R4507_ | GCUGGGGACCGAUCCUGAUUGCUCGCUGCGGCG | 996 |
| CasPhi32_ | AGACGGGAAGCUGAGGGCACGAGG | |
| C2TA_T1.9 | | |
| R4508_ | GCUGGGGACCGAUCCUGAUUGCUCGCUGCGGCG | 997 |
| CasPhi32_ | AGACACAGCGAUGCUGACCCCCUG | |
| C2TA_T2.1 | | |
| R4509_ | GCUGGGGACCGAUCCUGAUUGCUCGCUGCGGCG | 998 |
| CasPhi32_ | AGACUUAACAGCGAUGCUGACCCC | |
| C2TA_T2.2 | | |
| R4510_ | GCUGGGGACCGAUCCUGAUUGCUCGCUGCGGCG | 999 |
| CasPhi32_ | AGACUAUGACCAGAUGGACCUGGC | |
| C2TA_T2.3 | | |
| R4511_ | GCUGGGGACCGAUCCUGAUUGCUCGCUGCGGCG | 1000 |
| CasPhi32_ | AGACGGGCCCCUAGAAGGUGGCUA | |
| C2TA_T2.4 | | |
| R4512_ | GCUGGGGACCGAUCCUGAUUGCUCGCUGCGGCG | 1001 |
| CasPhi32_ | AGACUAGGGGCCCCAACUCCAUGG | |
| C2TA_T2.5 | | |
| R4513_ | GCUGGGGACCGAUCCUGAUUGCUCGCUGCGGCG | 1002 |
| CasPhi32_ | AGACAGAAGCUCCAGGUAGCCACC | |
| C2TA_T2.6 | | |
| R4514_ | GCUGGGGACCGAUCCUGAUUGCUCGCUGCGGCG | 1003 |
| CasPhi32_ | AGACUCCAGCCAGGUCCAUCUGGU | |
| C2TA_T2.7 | | |
| R4515_ | GCUGGGGACCGAUCCUGAUUGCUCGCUGCGGCG | 1004 |
| CasPhi32_ | AGACUUCUCCAGCCAGGUCCAUCU | |
| C2TA_T2.8 | | |

TABLE Q
CasΦ.12 gRNAs targeting mouse PCSK9

| | | SEQ |
|---|---|---|
| | Repeat + spacer sequence | ID |
| Name | RNA Sequence (5′ → 3′) | NO |
| R4238_ | CUUUCAAGACUAAUAGAUUGCUCCUUACGAGGAG | 1005 |
| CasPhi12 | ACCCGCUGUUGCCGCCGCUGCU | |
| R4239_ | CUUUCAAGACUAAUAGAUUGCUCCUUACGAGGAG | 1006 |
| CasPhi12 | ACCCGCCGCUGCUGCUGCUGUU | |
| R4240_ | CUUUCAAGACUAAUAGAUUGCUCCUUACGAGGAG | 1007 |
| CasPhi12 | ACCUGCUACUGUGCCCCACCGG | |
| R4241_ | CUUUCAAGACUAAUAGAUUGCUCCUUACGAGGAG | 1008 |
| CasPhi12 | ACAUAAUCUCCAUCCUCGUCCU | |
| R4242_ | CUUUCAAGACUAAUAGAUUGCUCCUUACGAGGAG | 1009 |
| CasPhi12 | ACUGAAGAGCUGAUGCUCGCCC | |
| R4243_ | CUUUCAAGACUAAUAGAUUGCUCCUUACGAGGAG | 1010 |
| CasPhi12 | ACGAGCAACGGCGGAAGGUGGC | |
| R4244_ | CUUUCAAGACUAAUAGAUUGCUCCUUACGAGGAG | 1011 |
| CasPhi12 | ACCUGGCAGCCUCCAGGCCUCC | |
| R4245_ | CUUUCAAGACUAAUAGAUUGCUCCUUACGAGGAG | 1012 |
| CasPhi12 | ACUGGUGCUGAUGGAGGAGACC | |
| R4246_ | CUUUCAAGACUAAUAGAUUGCUCCUUACGAGGAG | 1013 |
| CasPhi12 | ACAAUCUGUAGCCUCUGGGUCU | |
| R4247_ | CUUUCAAGACUAAUAGAUUGCUCCUUACGAGGAG | 1014 |
| CasPhi12 | ACUUCAAUCUGUAGCCUCUGGG | |
| R4248_ | CUUUCAAGACUAAUAGAUUGCUCCUUACGAGGAG | 1015 |
| CasPhi12 | ACGUUCAAUCUGUAGCCUCUGG | |
| R4249_ | CUUUCAAGACUAAUAGAUUGCUCCUUACGAGGAG | 1016 |
| CasPhi12 | ACAACAAACUGCCCACCGCCUG | |
| R4250_ | CUUUCAAGACUAAUAGAUUGCUCCUUACGAGGAG | 1017 |
| CasPhi12 | ACAUGACAUAGCCCCGGCGGGC | |
| R4251_ | CUUUCAAGACUAAUAGAUUGCUCCUUACGAGGAG | 1018 |
| CasPhi12 | ACUACAUAUCUUUUAUGACCUC | |
| R4252_ | CUUUCAAGACUAAUAGAUUGCUCCUUACGAGGAG | 1019 |
| CasPhi12 | ACUAUGACCUCUUCCCUGGCUU | |
| R4253_ | CUUUCAAGACUAAUAGAUUGCUCCUUACGAGGAG | 1020 |
| CasPhi12 | ACAUGACCUCUUCCCUGGCUUC | |
| R4254_ | CUUUCAAGACUAAUAGAUUGCUCCUUACGAGGAG | 1021 |
| CasPhi12 | ACUGACCUCUUCCCUGGCUUCU | |
| R4255_ | CUUUCAAGACUAAUAGAUUGCUCCUUACGAGGAG | 1022 |
| CasPhi12 | ACACCAAGAAGCCAGGGAAGAG | |
| R4256_ | CUUUCAAGACUAAUAGAUUGCUCCUUACGAGGAG | 1023 |
| CasPhi12 | ACCCUGGCUUCUUGGUGAAGAU | |
| R4257_ | CUUUCAAGACUAAUAGAUUGCUCCUUACGAGGAG | 1024 |
| CasPhi12 | ACUUGGUGAAGAUGAGCAGUGA | |
| R4258_ | CUUUCAAGACUAAUAGAUUGCUCCUUACGAGGAG | 1025 |
| CasPhi12 | ACGUGAAGAUGAGCAGUGACCU | |
| R4259_ | CUUUCAAGACUAAUAGAUUGCUCCUUACGAGGAG | 1026 |
| CasPhi12 | ACCCCCAUGUGGAGUACAUUGA | |
| R4260_ | CUUUCAAGACUAAUAGAUUGCUCCUUACGAGGAG | 1027 |
| CasPhi12 | ACCUCAAUGUACUCCACAUGGG | |
| R4261_ | CUUUCAAGACUAAUAGAUUGCUCCUUACGAGGAG | 1028 |
| CasPhi12 | ACAGGAAGACUCCUUUGUCUUC | |
| R4262_ | CUUUCAAGACUAAUAGAUUGCUCCUUACGAGGAG | 1029 |
| CasPhi12 | ACGUCUUCGCCCAGAGCAUCCC | |
| R4263_ | CUUUCAAGACUAAUAGAUUGCUCCUUACGAGGAG | 1030 |
| CasPhi12 | ACUCUUCGCCCAGAGCAUCCCA | |
| R4264_ | CUUUCAAGACUAAUAGAUUGCUCCUUACGAGGAG | 1031 |
| CasPhi12 | ACGCCCAGAGCAUCCCAUGGAA | |
| R4265_ | CUUUCAAGACUAAUAGAUUGCUCCUUACGAGGAG | 1032 |
| CasPhi12 | ACCAUGGGAUGCUCUGGGCGAA | |
| R4266_ | CUUUCAAGACUAAUAGAUUGCUCCUUACGAGGAG | 1033 |
| CasPhi12 | ACGCUCCAGGUUCCAUGGGAUG | |
| R4267_ | CUUUCAAGACUAAUAGAUUGCUCCUUACGAGGAG | 1034 |
| CasPhi12 | ACUCCCAGCAUGGCACCAGACA | |
| R4268_ | CUUUCAAGACUAAUAGAUUGCUCCUUACGAGGAG | 1035 |
| CasPhi12 | ACCUCUGUCUGGUGCCAUGCUG | |
| R4269_ | CUUUCAAGACUAAUAGAUUGCUCCUUACGAGGAG | 1036 |
| CasPhi12 | ACGAUACCAGCAUCCAGGGUGC | |
| R4270_ | CUUUCAAGACUAAUAGAUUGCUCCUUACGAGGAG | 1037 |
| CasPhi12 | ACAGGGCAGGGUCACCAUCACC | |
| R4271_ | CUUUCAAGACUAAUAGAUUGCUCCUUACGAGGAG | 1038 |
| CasPhi12 | ACAAGUCGGUGAUGGUGACCCU | |
| R4272_ | CUUUCAAGACUAAUAGAUUGCUCCUUACGAGGAG | 1039 |
| CasPhi12 | ACAACAGCGUGCCGGAGGAGGA | |
| R4273_ | CUUUCAAGACUAAUAGAUUGCUCCUUACGAGGAG | 1040 |
| CasPhi12 | ACGCCACACCAGCAUCCCGGCC | |
| R4274_ | CUUUCAAGACUAAUAGAUUGCUCCUUACGAGGAG | 1041 |
| CasPhi12 | ACAGCACACGCAGGCUGUGCAG | |
| R4275_ | CUUUCAAGACUAAUAGAUUGCUCCUUACGAGGAG | 1042 |
| CasPhi12 | ACACAGUUGAGCACACGCAGGC | |
| R4276_ | CUUUCAAGACUAAUAGAUUGCUCCUUACGAGGAG | 1043 |
| CasPhi12 | ACCCUUGACAGUUGAGCACACG | |
| R4277_ | CUUUCAAGACUAAUAGAUUGCUCCUUACGAGGAG | 1044 |
| CasPhi12 | ACGCUGACUCUUCCGAAUAAAC | |
| R4278_ | CUUUCAAGACUAAUAGAUUGCUCCUUACGAGGAG | 1045 |
| CasPhi12 | ACAUUCGGAAGAGUCAGCUAAU | |
| R4279_ | CUUUCAAGACUAAUAGAUUGCUCCUUACGAGGAG | 1046 |
| CasPhi12 | ACUUCGGAAGAGUCAGCUAAUC | |
| R4280_ | CUUUCAAGACUAAUAGAUUGCUCCUUACGAGGAG | 1047 |
| CasPhi12 | ACGGAAGAGUCAGCUAAUCCAG | |
| R4281_ | CUUUCAAGACUAAUAGAUUGCUCCUUACGAGGAG | 1048 |
| CasPhi12 | ACUGCUGCCCCUGGCCGGUGGG | |
| R4282_ | CUUUCAAGACUAAUAGAUUGCUCCUUACGAGGAG | 1049 |
| CasPhi12 | ACAGGAUGCGGCUAUACCCACC | |
| R4283_ | CUUUCAAGACUAAUAGAUUGCUCCUUACGAGGAG | 1050 |
| CasPhi12 | ACCCAGCUGCUGCAACCAGCAC | |
| R4284_ | CUUUCAAGACUAAUAGAUUGCUCCUUACGAGGAG | 1051 |
| CasPhi12 | ACCAGCAGCUGGGAACUUCCGG | |
| R4285_ | CUUUCAAGACUAAUAGAUUGCUCCUUACGAGGAG | 1052 |
| CasPhi12 | ACCGGGACGACGCCUGCCUCUA | |
| R4286_ | CUUUCAAGACUAAUAGAUUGCUCCUUACGAGGAG | 1053 |
| CasPhi12 | ACGUGGCCCCGACUGUGAUGAC | |
| R4287_ | CUUUCAAGACUAAUAGAUUGCUCCUUACGAGGAG | 1054 |
| CasPhi12 | ACCCUUGGGGACUUUGGGGACU | |
| R4288_ | CUUUCAAGACUAAUAGAUUGCUCCUUACGAGGAG | 1055 |
| CasPhi12 | ACGUCCCCAAAGUCCCCAAGGU | |
| R4289_ | CUUUCAAGACUAAUAGAUUGCUCCUUACGAGGAG | 1056 |
| CasPhi12 | ACGGGACUUUGGGGACUAAUUU | |
| R4290_ | CUUUCAAGACUAAUAGAUUGCUCCUUACGAGGAG | 1057 |
| CasPhi12 | ACGGGGACUAAUUUUGGACGCU | |
| R4291_ | CUUUCAAGACUAAUAGAUUGCUCCUUACGAGGAG | 1058 |
| CasPhi12 | ACGGGACUAAUUUUGGACGCUG | |
| R4292_ | CUUUCAAGACUAAUAGAUUGCUCCUUACGAGGAG | 1059 |
| CasPhi12 | ACUGGACGCUGUGUGGAUCUCU | |
| R4293_ | CUUUCAAGACUAAUAGAUUGCUCCUUACGAGGAG | 1060 |
| CasPhi12 | ACGGACGCUGUGUGGAUCUCUU | |
| R4294_ | CUUUCAAGACUAAUAGAUUGCUCCUUACGAGGAG | 1061 |
| CasPhi12 | ACGACGCUGUGUGGAUCUCUUU | |
| R4295_ | CUUUCAAGACUAAUAGAUUGCUCCUUACGAGGAG | 1062 |
| CasPhi12 | ACCCGGGGGCAAAGAGAUCCAC | |
| R4296_ | CUUUCAAGACUAAUAGAUUGCUCCUUACGAGGAG | 1063 |
| CasPhi12 | ACGCCCCCGGGAAGGACAUCAU | |
| R4297_ | CUUUCAAGACUAAUAGAUUGCUCCUUACGAGGAG | 1064 |
| CasPhi12 | ACCCCCCGGGAAGGACAUCAUC | |
| R4298_ | CUUUCAAGACUAAUAGAUUGCUCCUUACGAGGAG | 1065 |
| CasPhi12 | ACAUGUCACAGAGUGGGACCUC | |
| R4299_ | CUUUCAAGACUAAUAGAUUGCUCCUUACGAGGAG | 1066 |
| CasPhi12 | ACUGGCUCGGAUGCUGAGCCGG | |
| R4300_ | CUUUCAAGACUAAUAGAUUGCUCCUUACGAGGAG | 1067 |
| CasPhi12 | ACCCCUGGCCGAGCUGCGGCAG | |
| R4301_ | CUUUCAAGACUAAUAGAUUGCUCCUUACGAGGAG | 1068 |
| CasPhi12 | ACGUAGAGAAGUGGAUCAGCCU | |
| R4302_ | CUUUCAAGACUAAUAGAUUGCUCCUUACGAGGAG | 1069 |
| CasPhi12 | ACGGUAGAGAAGUGGAUCAGCC | |
| R4303_ | CUUUCAAGACUAAUAGAUUGCUCCUUACGAGGAG | 1070 |
| CasPhi12 | ACUCUACCAAAGACGUCAUCAA | |
| R4304_ | CUUUCAAGACUAAUAGAUUGCUCCUUACGAGGAG | 1071 |
| CasPhi12 | ACAUGACGUCUUUGGUAGAGAA | |
| R4305_ | CUUUCAAGACUAAUAGAUUGCUCCUUACGAGGAG | 1072 |
| CasPhi12 | ACCCUGAGGACCAGCAGGUGCU | |
| R4306_ | CUUUCAAGACUAAUAGAUUGCUCCUUACGAGGAG | 1073 |
| CasPhi12 | ACGGGGUCAGCACCUGCUGGUC | |
| R4307_ | CUUUCAAGACUAAUAGAUUGCUCCUUACGAGGAG | 1074 |
| CasPhi12 | ACGAGUGGGCCCCGAGUGUGCC | |
| R4308_ | CUUUCAAGACUAAUAGAUUGCUCCUUACGAGGAG | 1075 |
| CasPhi12 | ACUGGGGCACAGCGGGCUGUAG | |
| R4309_ | CUUUCAAGACUAAUAGAUUGCUCCUUACGAGGAG | 1076 |
| CasPhi12 | ACUCCAGGAGCGGGAGGCGUCG | |
| R4310_ | CUUUCAAGACUAAUAGAUUGCUCCUUACGAGGAG | 1077 |
| CasPhi12 | ACCAGACCUGCUGGCCUCCUAU | |
| R4311_ | CUUUCAAGACUAAUAGAUUGCUCCUUACGAGGAG | 1078 |
| CasPhi12 | ACAGGGCCUUGCAGACCUGCUG | |
| R4312_ | CUUUCAAGACUAAUAGAUUGCUCCUUACGAGGAG | 1079 |
| CasPhi12 | ACGGGGGUGAGGGUGUCUAUGC | |
| R4313_ | CUUUCAAGACUAAUAGAUUGCUCCUUACGAGGAG | 1080 |
| CasPhi12 | ACGGGGUGAGGGUGUCUAUGCC | |
| R4314_ | CUUUCAAGACUAAUAGAUUGCUCCUUACGAGGAG | 1081 |
| CasPhi12 | ACGCACGGGGAACCAGGCAGCA | |
| R4315_ | CUUUCAAGACUAAUAGAUUGCUCCUUACGAGGAG | 1082 |
| CasPhi12 | ACCCCGUGCCAACUGCAGCAUC | |
| R4316_ | CUUUCAAGACUAAUAGAUUGCUCCUUACGAGGAG | 1083 |
| CasPhi12 | ACUGGAUGCUGCAGUUGGCACG | |
| R4317_ | CUUUCAAGACUAAUAGAUUGCUCCUUACGAGGAG | 1084 |
| CasPhi12 | ACUGGUGGCAGUGGACAUGGGU | |
| R4318_ | CUUUCAAGACUAAUAGAUUGCUCCUUACGAGGAG | 1085 |
| CasPhi12 | ACCACUUCCCAAUGGAAGCUGC | |
| R4319_ | CUUUCAAGACUAAUAGAUUGCUCCUUACGAGGAG | 1086 |
| CasPhi12 | ACCAUUGGGAAGUGGAAGACCU | |
| R4320_ | CUUUCAAGACUAAUAGAUUGCUCCUUACGAGGAG | 1087 |
| CasPhi12 | ACGGAAGUGGAAGACCUUAGUG | |
| R4321_ | CUUUCAAGACUAAUAGAUUGCUCCUUACGAGGAG | 1088 |
| CasPhi12 | ACGUGUCCGGAGGCAGCCUGCG | |
| R4322_ | CUUUCAAGACUAAUAGAUUGCUCCUUACGAGGAG | 1089 |
| CasPhi12 | ACGCCACCAGGCGGCCAGUGUC | |
| R4323_ | CUUUCAAGACUAAUAGAUUGCUCCUUACGAGGAG | 1090 |
| CasPhi12 | ACCUGCUGCCAUGCCCCAGGGC | |
| R4324_ | CUUUCAAGACUAAUAGAUUGCUCCUUACGAGGAG | 1091 |
| CasPhi12 | ACCAGCCCUGGGGCAUGGCAGC | |
| R4325_ | CUUUCAAGACUAAUAGAUUGCUCCUUACGAGGAG | 1092 |
| CasPhi12 | ACCAUUCCAGCCCUGGGGCAUG | |
| R4326_ | CUUUCAAGACUAAUAGAUUGCUCCUUACGAGGAG | 1093 |
| CasPhi12 | ACGCAUUCCAGCCCUGGGGCAU | |
| R4327_ | CUUUCAAGACUAAUAGAUUGCUCCUUACGAGGAG | 1094 |
| CasPhi12 | ACUGCAUUCCAGCCCUGGGGCA | |
| R4328_ | CUUUCAAGACUAAUAGAUUGCUCCUUACGAGGAG | 1095 |
| CasPhi12 | ACAUUUUGCAUUCCAGCCCUGG | |
| R4329_ | CUUUCAAGACUAAUAGAUUGCUCCUUACGAGGAG | 1096 |
| CasPhi12 | ACCAUCCAGUCAGGGUCCAUCC | |
| R4330_ | CUUUCAAGACUAAUAGAUUGCUCCUUACGAGGAG | 1097 |
| CasPhi12 | ACUCCACGCUGUAGGCUCCCAG | |
| R4331_ | CUUUCAAGACUAAUAGAUUGCUCCUUACGAGGAG | 1098 |
| CasPhi12 | ACCCACACACAGGUUGUCCACG | |
| R4332_ | CUUUCAAGACUAAUAGAUUGCUCCUUACGAGGAG | 1099 |
| CasPhi12 | ACUCCACUGGUCCUGUCUGCUC | |
| R4333_ | CUUUCAAGACUAAUAGAUUGCUCCUUACGAGGAG | 1100 |
| CasPhi12 | ACCUGAAGGCCGGCUCCGGCAG | |

TABLE R
CasΦ.32 gRNAs targeting mouse PCSK9

| | | SEQ |
|---|---|---|
| | Repeat + spacer sequence | ID |
| Name | RNA Sequence (5′ → 3′) | NO |
| R4238_ | GCUGGGGACCGAUCCUGAUUGCUCGCUGCGGCGAG | 1101 |
| CasPhi32 | ACCCGCUGUUGCCGCCGCUGCU | |
| R4239_ | GCUGGGGACCGAUCCUGAUUGCUCGCUGCGGCGAG | 1102 |
| CasPhi32 | ACCCGCCGCUGCUGCUGCUGUU | |
| R4240_ | GCUGGGGACCGAUCCUGAUUGCUCGCUGCGGCGAG | 1103 |
| CasPhi32 | ACCUGCUACUGUGCCCCACCGG | |
| R4241_ | GCUGGGGACCGAUCCUGAUUGCUCGCUGCGGCGAG | 1104 |
| CasPhi32 | ACAUAAUCUCCAUCCUCGUCCU | |
| R4242_ | GCUGGGGACCGAUCCUGAUUGCUCGCUGCGGCGAG | 1105 |
| CasPhi32 | ACUGAAGAGCUGAUGCUCGCCC | |
| R4243_ | GCUGGGGACCGAUCCUGAUUGCUCGCUGCGGCGAG | 1106 |
| CasPhi32 | ACGAGCAACGGCGGAAGGUGGC | |
| R4244_ | GCUGGGGACCGAUCCUGAUUGCUCGCUGCGGCGAG | 1107 |
| CasPhi32 | ACCUGGCAGCCUCCAGGCCUCC | |
| R4245_ | GCUGGGGACCGAUCCUGAUUGCUCGCUGCGGCGAG | 1108 |
| CasPhi32 | ACUGGUGCUGAUGGAGGAGACC | |
| R4246_ | GCUGGGGACCGAUCCUGAUUGCUCGCUGCGGCGAG | 1109 |
| CasPhi32 | ACAAUCUGUAGCCUCUGGGUCU | |
| R4247_ | GCUGGGGACCGAUCCUGAUUGCUCGCUGCGGCGAG | 1110 |
| CasPhi32 | ACUUCAAUCUGUAGCCUCUGGG | |
| R4248_ | GCUGGGGACCGAUCCUGAUUGCUCGCUGCGGCGAG | 1111 |
| CasPhi32 | ACGUUCAAUCUGUAGCCUCUGG | |
| R4249_ | GCUGGGGACCGAUCCUGAUUGCUCGCUGCGGCGAG | 1112 |
| CasPhi32 | ACAACAAACUGCCCACCGCCUG | |
| R4250_ | GCUGGGGACCGAUCCUGAUUGCUCGCUGCGGCGAG | 1113 |
| CasPhi32 | ACAUGACAUAGCCCCGGCGGGC | |
| R4251_ | GCUGGGGACCGAUCCUGAUUGCUCGCUGCGGCGAG | 1114 |
| CasPhi32 | ACUACAUAUCUUUUAUGACCUC | |
| R4252_ | GCUGGGGACCGAUCCUGAUUGCUCGCUGCGGCGAG | 1115 |
| CasPhi32 | ACUAUGACCUCUUCCCUGGCUU | |
| R4253_ | GCUGGGGACCGAUCCUGAUUGCUCGCUGCGGCGAG | 1116 |
| CasPhi32 | ACAUGACCUCUUCCCUGGCUUC | |
| R4254_ | GCUGGGGACCGAUCCUGAUUGCUCGCUGCGGCGAG | 1117 |
| CasPhi32 | ACUGACCUCUUCCCUGGCUUCU | |
| R4255_ | GCUGGGGACCGAUCCUGAUUGCUCGCUGCGGCGAG | 1118 |
| CasPhi32 | ACACCAAGAAGCCAGGGAAGAG | |
| R4256_ | GCUGGGGACCGAUCCUGAUUGCUCGCUGCGGCGAG | 1119 |
| CasPhi32 | ACCCUGGCUUCUUGGUGAAGAU | |
| R4257_ | GCUGGGGACCGAUCCUGAUUGCUCGCUGCGGCGAG | 1120 |
| CasPhi32 | ACUUGGUGAAGAUGAGCAGUGA | |
| R4258_ | GCUGGGGACCGAUCCUGAUUGCUCGCUGCGGCGAG | 1121 |
| CasPhi32 | ACGUGAAGAUGAGCAGUGACCU | |
| R4259_ | GCUGGGGACCGAUCCUGAUUGCUCGCUGCGGCGAG | 1122 |
| CasPhi32 | ACCCCCAUGUGGAGUACAUUGA | |
| R4260_ | GCUGGGGACCGAUCCUGAUUGCUCGCUGCGGCGAG | 1123 |
| CasPhi32 | ACCUCAAUGUACUCCACAUGGG | |
| R4261_ | GCUGGGGACCGAUCCUGAUUGCUCGCUGCGGCGAG | 1124 |
| CasPhi32 | ACAGGAAGACUCCUUUGUCUUC | |
| R4262_ | GCUGGGGACCGAUCCUGAUUGCUCGCUGCGGCGAG | 1125 |
| CasPhi32 | ACGUCUUCGCCCAGAGCAUCCC | |
| R4263_ | GCUGGGGACCGAUCCUGAUUGCUCGCUGCGGCGAG | 1126 |
| CasPhi32 | ACUCUUCGCCCAGAGCAUCCCA | |
| R4264_ | GCUGGGGACCGAUCCUGAUUGCUCGCUGCGGCGAG | 1127 |
| CasPhi32 | ACGCCCAGAGCAUCCCAUGGAA | |
| R4265_ | GCUGGGGACCGAUCCUGAUUGCUCGCUGCGGCGAG | 1128 |
| CasPhi32 | ACCAUGGGAUGCUCUGGGCGAA | |
| R4266_ | GCUGGGGACCGAUCCUGAUUGCUCGCUGCGGCGAG | 1129 |
| CasPhi32 | ACGCUCCAGGUUCCAUGGGAUG | |
| R4267_ | GCUGGGGACCGAUCCUGAUUGCUCGCUGCGGCGAG | 1130 |
| CasPhi32 | ACUCCCAGCAUGGCACCAGACA | |
| R4268_ | GCUGGGGACCGAUCCUGAUUGCUCGCUGCGGCGAG | 1131 |
| CasPhi32 | ACCUCUGUCUGGUGCCAUGCUG | |
| R4269_ | GCUGGGGACCGAUCCUGAUUGCUCGCUGCGGCGAG | 1132 |
| CasPhi32 | ACGAUACCAGCAUCCAGGGUGC | |
| R4270_ | GCUGGGGACCGAUCCUGAUUGCUCGCUGCGGCGAG | 1133 |
| CasPhi32 | ACAGGGCAGGGUCACCAUCACC | |
| R4271_ | GCUGGGGACCGAUCCUGAUUGCUCGCUGCGGCGAG | 1134 |
| CasPhi32 | ACAAGUCGGUGAUGGUGACCCU | |
| R4272_ | GCUGGGGACCGAUCCUGAUUGCUCGCUGCGGCGAG | 1135 |
| CasPhi32 | ACAACAGCGUGCCGGAGGAGGA | |
| R4273_ | GCUGGGGACCGAUCCUGAUUGCUCGCUGCGGCGAG | 1136 |
| CasPhi32 | ACGCCACACCAGCAUCCCGGCC | |
| R4274_ | GCUGGGGACCGAUCCUGAUUGCUCGCUGCGGCGAG | 1137 |
| CasPhi32 | ACAGCACACGCAGGCUGUGCAG | |
| R4275_ | GCUGGGGACCGAUCCUGAUUGCUCGCUGCGGCGAG | 1138 |
| CasPhi32 | ACACAGUUGAGCACACGCAGGC | |
| R4276_ | GCUGGGGACCGAUCCUGAUUGCUCGCUGCGGCGAG | 1139 |
| CasPhi32 | ACCCUUGACAGUUGAGCACACG | |
| R4277_ | GCUGGGGACCGAUCCUGAUUGCUCGCUGCGGCGAG | 1140 |
| CasPhi32 | ACGCUGACUCUUCCGAAUAAAC | |
| R4278_ | GCUGGGGACCGAUCCUGAUUGCUCGCUGCGGCGAG | 1141 |
| CasPhi32 | ACAUUCGGAAGAGUCAGCUAAU | |
| R4279_ | GCUGGGGACCGAUCCUGAUUGCUCGCUGCGGCGAG | 1142 |
| CasPhi32 | ACUUCGGAAGAGUCAGCUAAUC | |
| R4280_ | GCUGGGGACCGAUCCUGAUUGCUCGCUGCGGCGAG | 1143 |
| CasPhi32 | ACGGAAGAGUCAGCUAAUCCAG | |
| R4281_ | GCUGGGGACCGAUCCUGAUUGCUCGCUGCGGCGAG | 1144 |
| CasPhi32 | ACUGCUGCCCCUGGCCGGUGGG | |
| R4282_ | GCUGGGGACCGAUCCUGAUUGCUCGCUGCGGCGAG | 1145 |
| CasPhi32 | ACAGGAUGCGGCUAUACCCACC | |
| R4283_ | GCUGGGGACCGAUCCUGAUUGCUCGCUGCGGCGAG | 1146 |
| CasPhi32 | ACCCAGCUGCUGCAACCAGCAC | |
| R4284_ | GCUGGGGACCGAUCCUGAUUGCUCGCUGCGGCGAG | 1147 |
| CasPhi32 | ACCAGCAGCUGGGAACUUCCGG | |
| R4285_ | GCUGGGGACCGAUCCUGAUUGCUCGCUGCGGCGAG | 1148 |
| CasPhi32 | ACCGGGACGACGCCUGCCUCUA | |
| R4286_ | GCUGGGGACCGAUCCUGAUUGCUCGCUGCGGCGAG | 1149 |
| CasPhi32 | ACGUGGCCCCGACUGUGAUGAC | |
| R4287_ | GCUGGGGACCGAUCCUGAUUGCUCGCUGCGGCGAG | 1150 |
| CasPhi32 | ACCCUUGGGGACUUUGGGGACU | |
| R4288_ | GCUGGGGACCGAUCCUGAUUGCUCGCUGCGGCGAG | 1151 |
| CasPhi32 | ACGUCCCCAAAGUCCCCAAGGU | |
| R4289_ | GCUGGGGACCGAUCCUGAUUGCUCGCUGCGGCGAG | 1152 |
| CasPhi32 | ACGGGACUUUGGGGACUAAUUU | |
| R4290_ | GCUGGGGACCGAUCCUGAUUGCUCGCUGCGGCGAG | 1153 |
| CasPhi32 | ACGGGGACUAAUUUUGGACGCU | |
| R4291_ | GCUGGGGACCGAUCCUGAUUGCUCGCUGCGGCGAG | 1154 |
| CasPhi32 | ACGGGACUAAUUUUGGACGCUG | |
| R4292_ | GCUGGGGACCGAUCCUGAUUGCUCGCUGCGGCGAG | 1155 |
| CasPhi32 | ACUGGACGCUGUGUGGAUCUCU | |
| R4293_ | GCUGGGGACCGAUCCUGAUUGCUCGCUGCGGCGAG | 1156 |
| CasPhi32 | ACGGACGCUGUGUGGAUCUCUU | |
| R4294_ | GCUGGGGACCGAUCCUGAUUGCUCGCUGCGGCGAG | 1157 |
| CasPhi32 | ACGACGCUGUGUGGAUCUCUUU | |
| R4295_ | GCUGGGGACCGAUCCUGAUUGCUCGCUGCGGCGAG | 1158 |
| CasPhi32 | ACCCGGGGGCAAAGAGAUCCAC | |
| R4296_ | GCUGGGGACCGAUCCUGAUUGCUCGCUGCGGCGAG | 1159 |
| CasPhi32 | ACGCCCCCGGGAAGGACAUCAU | |
| R4297_ | GCUGGGGACCGAUCCUGAUUGCUCGCUGCGGCGAG | 1160 |
| CasPhi32 | ACCCCCCGGGAAGGACAUCAUC | |
| R4298_ | GCUGGGGACCGAUCCUGAUUGCUCGCUGCGGCGAG | 1161 |
| CasPhi32 | ACAUGUCACAGAGUGGGACCUC | |
| R4299_ | GCUGGGGACCGAUCCUGAUUGCUCGCUGCGGCGAG | 1162 |
| CasPhi32 | ACUGGCUCGGAUGCUGAGCCGG | |
| R4300_ | GCUGGGGACCGAUCCUGAUUGCUCGCUGCGGCGAG | 1163 |
| CasPhi32 | ACCCCUGGCCGAGCUGCGGCAG | |
| R4301_ | GCUGGGGACCGAUCCUGAUUGCUCGCUGCGGCGAG | 1164 |
| CasPhi32 | ACGUAGAGAAGUGGAUCAGCCU | |
| R4302_ | GCUGGGGACCGAUCCUGAUUGCUCGCUGCGGCGAG | 1165 |
| CasPhi32 | ACGGUAGAGAAGUGGAUCAGCC | |
| R4303_ | GCUGGGGACCGAUCCUGAUUGCUCGCUGCGGCGAG | 1166 |
| CasPhi32 | ACUCUACCAAAGACGUCAUCAA | |
| R4304_ | GCUGGGGACCGAUCCUGAUUGCUCGCUGCGGCGAG | 1167 |
| CasPhi32 | ACAUGACGUCUUUGGUAGAGAA | |
| R4305_ | GCUGGGGACCGAUCCUGAUUGCUCGCUGCGGCGAG | 1168 |
| CasPhi32 | ACCCUGAGGACCAGCAGGUGCU | |
| R4306_ | GCUGGGGACCGAUCCUGAUUGCUCGCUGCGGCGAG | 1169 |
| CasPhi32 | ACGGGGUCAGCACCUGCUGGUC | |
| R4307_ | GCUGGGGACCGAUCCUGAUUGCUCGCUGCGGCGAG | 1170 |
| CasPhi32 | ACGAGUGGGCCCCGAGUGUGCC | |
| R4308_ | GCUGGGGACCGAUCCUGAUUGCUCGCUGCGGCGAG | 1171 |
| CasPhi32 | ACUGGGGCACAGCGGGCUGUAG | |
| R4309_ | GCUGGGGACCGAUCCUGAUUGCUCGCUGCGGCGAG | 1172 |
| CasPhi32 | ACUCCAGGAGCGGGAGGCGUCG | |
| R4310_ | GCUGGGGACCGAUCCUGAUUGCUCGCUGCGGCGAG | 1173 |
| CasPhi32 | ACCAGACCUGCUGGCCUCCUAU | |
| R4311_ | GCUGGGGACCGAUCCUGAUUGCUCGCUGCGGCGAG | 1174 |
| CasPhi32 | ACAGGGCCUUGCAGACCUGCUG | |
| R4312_ | GCUGGGGACCGAUCCUGAUUGCUCGCUGCGGCGAG | 1175 |
| CasPhi32 | ACGGGGGUGAGGGUGUCUAUGC | |
| R4313_ | GCUGGGGACCGAUCCUGAUUGCUCGCUGCGGCGAG | 1176 |
| CasPhi32 | ACGGGGUGAGGGUGUCUAUGCC | |
| R4314_ | GCUGGGGACCGAUCCUGAUUGCUCGCUGCGGCGAG | 1177 |
| CasPhi32 | ACGCACGGGGAACCAGGCAGCA | |
| R4315_ | GCUGGGGACCGAUCCUGAUUGCUCGCUGCGGCGAG | 1178 |
| CasPhi32 | ACCCCGUGCCAACUGCAGCAUC | |
| R4316_ | GCUGGGGACCGAUCCUGAUUGCUCGCUGCGGCGAG | 1179 |
| CasPhi32 | ACUGGAUGCUGCAGUUGGCACG | |
| R4317_ | GCUGGGGACCGAUCCUGAUUGCUCGCUGCGGCGAG | 1180 |
| CasPhi32 | ACUGGUGGCAGUGGACAUGGGU | |
| R4318_ | GCUGGGGACCGAUCCUGAUUGCUCGCUGCGGCGAG | 1181 |
| CasPhi32 | ACCACUUCCCAAUGGAAGCUGC | |
| R4319_ | GCUGGGGACCGAUCCUGAUUGCUCGCUGCGGCGAG | 1182 |
| CasPhi32 | ACCAUUGGGAAGUGGAAGACCU | |
| R4320_ | GCUGGGGACCGAUCCUGAUUGCUCGCUGCGGCGAG | 1183 |
| CasPhi32 | ACGGAAGUGGAAGACCUUAGUG | |
| R4321_ | GCUGGGGACCGAUCCUGAUUGCUCGCUGCGGCGAG | 1184 |
| CasPhi32 | ACGUGUCCGGAGGCAGCCUGCG | |
| R4322_ | GCUGGGGACCGAUCCUGAUUGCUCGCUGCGGCGAG | 1185 |
| CasPhi32 | ACGCCACCAGGCGGCCAGUGUC | |
| R4323_ | GCUGGGGACCGAUCCUGAUUGCUCGCUGCGGCGAG | 1186 |
| CasPhi32 | ACCUGCUGCCAUGCCCCAGGGC | |
| R4324_ | GCUGGGGACCGAUCCUGAUUGCUCGCUGCGGCGAG | 1187 |
| CasPhi32 | ACCAGCCCUGGGGCAUGGCAGC | |
| R4325_ | GCUGGGGACCGAUCCUGAUUGCUCGCUGCGGCGAG | 1188 |
| CasPhi32 | ACCAUUCCAGCCCUGGGGCAUG | |
| R4326_ | GCUGGGGACCGAUCCUGAUUGCUCGCUGCGGCGAG | 1189 |
| CasPhi32 | ACGCAUUCCAGCCCUGGGGCAU | |
| R4327_ | GCUGGGGACCGAUCCUGAUUGCUCGCUGCGGCGAG | 1190 |
| CasPhi32 | ACUGCAUUCCAGCCCUGGGGCA | |
| R4328_ | GCUGGGGACCGAUCCUGAUUGCUCGCUGCGGCGAG | 1191 |
| CasPhi32 | ACAUUUUGCAUUCCAGCCCUGG | |
| R4329_ | GCUGGGGACCGAUCCUGAUUGCUCGCUGCGGCGAG | 1192 |
| CasPhi32 | ACCAUCCAGUCAGGGUCCAUCC | |
| R4330_ | GCUGGGGACCGAUCCUGAUUGCUCGCUGCGGCGAG | 1193 |
| CasPhi32 | ACUCCACGCUGUAGGCUCCCAG | |
| R4331_ | GCUGGGGACCGAUCCUGAUUGCUCGCUGCGGCGAG | 1194 |
| CasPhi32 | ACCCACACACAGGUUGUCCACG | |
| R4332_ | GCUGGGGACCGAUCCUGAUUGCUCGCUGCGGCGAG | 1195 |
| CasPhi32 | ACUCCACUGGUCCUGUCUGCUC | |
| R4333_ | GCUGGGGACCGAUCCUGAUUGCUCGCUGCGGCGAG | 1196 |
| CasPhi32 | ACCUGAAGGCCGGCUCCGGCAG | |

TABLE S
CasΦ.12 gRNAs targeting Bak1 in CHO cells

| | Repeat + spacer RNA Sequence (5′ → 3′), | |
|---|---|---|
| Name | shown as DNA | SEQ ID NO |
| R2452 | CTTTCAAGACTAATAGATTGCTCCTTACGAG | 1197 |
| Bak1_CasPhi12_1 | GAGACGAAGCTATGTTTTCCATCTC | |
| R2453 | CTTTCAAGACTAATAGATTGCTCCTTACGAG | 1198 |
| Bak1_CasPhi12_2 | GAGACGCAGGGGCAGCCGCCCCCTG | |
| R2454 | CTTTCAAGACTAATAGATTGCTCCTTACGAG | 1199 |
| Bak1_CasPhi12_3 | GAGACCTCCTAGAACCCAACAGGTA | |
| R2455 | CTTTCAAGACTAATAGATTGCTCCTTACGAG | 1200 |
| Bak1_CasPhi12_4 | GAGACGAAAGACCTCCTCTGTGTCC | |
| R2456 | CTTTCAAGACTAATAGATTGCTCCTTACGAG | 1201 |
| Bak1_CasPhi12_5 | GAGACTCCATCTCGGGGTTGGCAGG | |
| R2457 | CTTTCAAGACTAATAGATTGCTCCTTACGAG | 1202 |
| Bak1_CasPhi12_6 | GAGACTTCCTGATGGTGGAGATGGA | |
| R2849_Bak1_ | CTTTCAAGACTAATAGATTGCTCCTTACGAG | 1203 |
| CasPhi12_nsd_sg1 | GAGACCTGACTCCCAGCTCTGACCC | |
| R2850_Bak1_ | CTTTCAAGACTAATAGATTGCTCCTTACGAG | 1204 |
| CasPhi12_nsd_sg2 | GAGACTGGGGTCAGAGCTGGGAGTC | |
| R2851_Bak1__ | CTTTCAAGACTAATAGATTGCTCCTTACGAG | 1205 |
| CasPhi12_nsd_sg3 | GAGACGAAAGACCTCCTCTGTGTCC | |
| R2852_Bak1_ | CTTTCAAGACTAATAGATTGCTCCTTACGAG | 1206 |
| CasPhi12_nsd_sg4 | GAGACCGAAGCTATGTTTTCCATCT | |
| R2853_Bak1_ | CTTTCAAGACTAATAGATTGCTCCTTACGAG | 1207 |
| CasPhi12_nsd_sg5 | GAGACGAAGCTATGTTTTCCATCTC | |
| R2854_Bak1_ | CTTTCAAGACTAATAGATTGCTCCTTACGAG | 1208 |
| CasPhi12_nsd_sg6 | GAGACTCCATCTCCACCATCAGGAA | |
| R2855_Bak1 | CTTTCAAGACTAATAGATTGCTCCTTACGAG | 1209 |
| CasPhi12_nsd_sg7 | GAGACCCATCTCCACCATCAGGAAC | |
| R2856_Bak1_ | CTTTCAAGACTAATAGATTGCTCCTTACGAG | 1210 |
| CasPhi12_nsd_sg8 | GAGACCTGATGGTGGAGATGGAAAA | |
| R2857_Bak1_ | CTTTCAAGACTAATAGATTGCTCCTTACGAG | 1211 |
| CasPhi12_nsd_sg9 | GAGACCATCTCCACCATCAGGAACA | |
| R2858_Bak1_ | CTTTCAAGACTAATAGATTGCTCCTTACGAG | 1212 |
| CasPhi12_nsd_sg10 | GAGACTTCCTGATGGTGGAGATGGA | |
| R2859_Bak1_ | CTTTCAAGACTAATAGATTGCTCCTTACGAG | 1213 |
| CasPhi12_nsd_sg11 | GAGACGCAGGGGCAGCCGCCCCCTG | |
| R2860_Bak1_ | CTTTCAAGACTAATAGATTGCTCCTTACGAG | 1214 |
| CasPhi12_nsd_sg12 | GAGACTCCATCTCGGGGTTGGCAGG | |
| R2861_Bak1_ | CTTTCAAGACTAATAGATTGCTCCTTACGAG | 1215 |
| CasPhi12_nsd_sg13 | GAGACTAGGAGCAAATTGTCCATCT | |
| R2862_Bak1_ | CTTTCAAGACTAATAGATTGCTCCTTACGAG | 1216 |
| CasPhi12_nsd_sg14 | GAGACGGTTCTAGGAGCAAATTGTC | |
| R2863_Bak1_ | CTTTCAAGACTAATAGATTGCTCCTTACGAG | 1217 |
| CasPhi12_nsd_sg15 | GAGACGCTCCTAGAACCCAACAGGT | |
| R2864_Bak1_ | CTTTCAAGACTAATAGATTGCTCCTTACGAG | 1218 |
| CasPhi12_nsd_sg16 | GAGACCTCCTAGAACCCAACAGGTA | |
| R3977_Bak1_ | CTTTCAAGACTAATAGATTGCTCCTTACGAG | 1219 |
| CasPhi12_exon1_sg1 | GAGACTCCAGACGCCATCTTTCAGG | |
| R3978_Bak1_ | CTTTCAAGACTAATAGATTGCTCCTTACGAG | 1220 |
| CasPhi12_exon1_sg2 | GAGACTGGTAAGAGTCCTCCTGCCC | |
| R3979_Bak1_ | CTTTCAAGACTAATAGATTGCTCCTTACGAG | 1221 |
| CasPhi12_exon3_sg1 | GAGACTTACAGCATCTTGGGTCAGG | |
| R3980_Bak1_ | CTTTCAAGACTAATAGATTGCTCCTTACGAG | 1222 |
| CasPhi12_exon3_sg2 | GAGACGGTCAGGTGGGCCGGCAGCT | |
| R3981_Bak1_ | CTTTCAAGACTAATAGATTGCTCCTTACGAG | 1223 |
| CasPhi12_exon3_sg3 | GAGACCTATCATTGGAGATGACATT | |
| R3982_Bak1_ | CTTTCAAGACTAATAGATTGCTCCTTACGAG | 1224 |
| CasPhi12_exon3_sg4 | GAGACGAGATGACATTAACCGGAGA | |
| R3983_Bak1_ | CTTTCAAGACTAATAGATTGCTCCTTACGAG | 1225 |
| CasPhi12_exon3_sg5 | GAGACTGGAACTCTGTGTCGTATCT | |
| R3984_Bak1_ | CTTTCAAGACTAATAGATTGCTCCTTACGAG | 1226 |
| CasPhi12_exon3_sg6 | GAGACCAGAATTTACTGGAGCAGCT | |
| R3985_Bak1_ | CTTTCAAGACTAATAGATTGCTCCTTACGAG | 1227 |
| CasPhi12_exon3_sg7 | GAGACACTGGAGCAGCTGCAGCCCA | |
| R3986_Bak1_ | CTTTCAAGACTAATAGATTGCTCCTTACGAG | 1228 |
| CasPhi12_exon3_sg8 | GAGACCCAGCTGTGGGCTGCAGCTG | |
| R3987_Bak1_ | CTTTCAAGACTAATAGATTGCTCCTTACGAG | 1229 |
| CasPhi12_exon3_sg9 | GAGACGTAGGCATTCCCAGCTGTGG | |
| R3988_Bak1_ | CTTTCAAGACTAATAGATTGCTCCTTACGAG | 1230 |
| CasPhi12_exon3_ | GAGACGTGAAGAGTTCGTAGGCATT | |
| sg10 | | |
| R3989_Bak1_ | CTTTCAAGACTAATAGATTGCTCCTTACGAG | 1231 |
| CasPhi12_exon3_ | GAGACACCAAGATTGCCTCCAGGTA | |
| sg11 | | |
| R3990_Bak1_ | CTTTCAAGACTAATAGATTGCTCCTTACGAG | 1232 |
| CasPhi12_exon3_ | GAGACCCTCCAGGTACCCACCACCA | |
| sg12 | | |

TABLE T
CasΦ.32 gRNAs targeting Bak1 in CHO cells

| | Repeat + spacer RNA Sequence (5′ → 3′), | |
|---|---|---|
| Name | shown as DNA | SEQ ID NO |
| R2452 | GCTGGGGACCGATCCTGATTGCTCGCTGCGG | 1233 |
| Bak1_CasPhi32_1 | CGAGACGAAGCTATGTTTTCCATCTC | |
| R2453 | GCTGGGGACCGATCCTGATTGCTCGCTGCGG | 1234 |
| Bak1_CasPhi32_2 | CGAGACGCAGGGGCAGCCGCCCCCTG | |
| R2454 | GCTGGGGACCGATCCTGATTGCTCGCTGCGG | 1235 |
| Bak1_CasPhi32_3 | CGAGACCTCCTAGAACCCAACAGGTA | |
| R2455 | GCTGGGGACCGATCCTGATTGCTCGCTGCGG | 1236 |
| Bak1_CasPhi32_4 | CGAGACGAAAGACCTCCTCTGTGTCC | |
| R2456 | GCTGGGGACCGATCCTGATTGCTCGCTGCGG | 1237 |
| Bak1_CasPhi32_5 | CGAGACTCCATCTCGGGGTTGGCAGG | |
| R2457 | GCTGGGGACCGATCCTGATTGCTCGCTGCGG | 1238 |
| Bak1_CasPhi32_6 | CGAGACTTCCTGATGGTGGAGATGGA | |
| R2849_Bak1_ | GCTGGGGACCGATCCTGATTGCTCGCTGCGG | 1239 |
| CasPhi32_nsd_sg1 | CGAGACCTGACTCCCAGCTCTGACCC | |
| R2850_Bak1_ | GCTGGGGACCGATCCTGATTGCTCGCTGCGG | 1240 |
| CasPhi32_nsd_sg2 | CGAGACTGGGGTCAGAGCTGGGAGTC | |
| R2851_Bak1_ | GCTGGGGACCGATCCTGATTGCTCGCTGCGG | 1241 |
| CasPhi32_nsd_sg3 | CGAGACGAAAGACCTCCTCTGTGTCC | |
| R2852_Bak1_ | GCTGGGGACCGATCCTGATTGCTCGCTGCGG | 1242 |
| CasPhi32_nsd_sg4 | CGAGACCGAAGCTATGTTTTCCATCT | |
| R2853_Bak1_ | GCTGGGGACCGATCCTGATTGCTCGCTGCGG | 1243 |
| CasPhi32_nsd_sg5 | CGAGACGAAGCTATGTTTTCCATCTC | |
| R2854_Bak1_ | GCTGGGGACCGATCCTGATTGCTCGCTGCGG | 1244 |
| CasPhi32_nsd_sg6 | CGAGACTCCATCTCCACCATCAGGAA | |
| R2855_Bak1_ | GCTGGGGACCGATCCTGATTGCTCGCTGCGG | 1245 |
| CasPhi32_nsd_sg7 | CGAGACCCATCTCCACCATCAGGAAC | |
| R2856_Bak1_ | GCTGGGGACCGATCCTGATTGCTCGCTGCGG | 1246 |
| CasPhi32_nsd_sg8 | CGAGACCTGATGGTGGAGATGGAAAA | |
| R2857_Bak1_ | GCTGGGGACCGATCCTGATTGCTCGCTGCGG | 1247 |
| CasPhi32_nsd_sg9 | CGAGACCATCTCCACCATCAGGAACA | |
| R2858_Bak1_ | GCTGGGGACCGATCCTGATTGCTCGCTGCGG | 1248 |
| CasPhi32_nsd_sg10 | CGAGACTTCCTGATGGTGGAGATGGA | |
| R2859_Bak1_ | GCTGGGGACCGATCCTGATTGCTCGCTGCGG | 1249 |
| CasPhi32_nsd_sg11 | CGAGACGCAGGGGCAGCCGCCCCCTG | |
| R2860_Bak1_ | GCTGGGGACCGATCCTGATTGCTCGCTGCGG | 1250 |
| CasPhi32_nsd_sg12 | CGAGACTCCATCTCGGGGTTGGCAGG | |
| R2861_Bak1_ | GCTGGGGACCGATCCTGATTGCTCGCTGCGG | 1251 |
| CasPhi32_nsd_sg13 | CGAGACTAGGAGCAAATTGTCCATCT | |
| R2862_Bak1_ | GCTGGGGACCGATCCTGATTGCTCGCTGCGG | 1252 |
| CasPhi32_nsd_sg14 | CGAGACGGTTCTAGGAGCAAATTGTC | |
| R2863_Bak1_ | GCTGGGGACCGATCCTGATTGCTCGCTGCGG | 1253 |
| CasPhi32_nsd_sg15 | CGAGACGCTCCTAGAACCCAACAGGT | |
| R2864_Bak1_ | GCTGGGGACCGATCCTGATTGCTCGCTGCGG | 1254 |
| CasPhi32_nsd_sg16 | CGAGACCTCCTAGAACCCAACAGGTA | |
| R3977_Bak1_ | GCTGGGGACCGATCCTGATTGCTCGCTGCGG | 1255 |
| CasPhi32_exon1_sg1 | CGAGACTCCAGACGCCATCTTTCAGG | |
| R3978_Bak1_ | GCTGGGGACCGATCCTGATTGCTCGCTGCGG | 1256 |
| CasPhi32_exon1_sg2 | CGAGACTGGTAAGAGTCCTCCTGCCC | |
| R3979_Bak1_ | GCTGGGGACCGATCCTGATTGCTCGCTGCGG | 1257 |
| CasPhi32_exon3_sg1 | CGAGACTTACAGCATCTTGGGTCAGG | |
| R3980_Bak1_ | GCTGGGGACCGATCCTGATTGCTCGCTGCGG | 1258 |
| CasPhi32_exon3_sg2 | CGAGACGGTCAGGTGGGCCGGCAGCT | |
| R3981_Bak1_ | GCTGGGGACCGATCCTGATTGCTCGCTGCGG | 1259 |
| CasPhi32_exon3_sg3 | CGAGACCTATCATTGGAGATGACATT | |
| R3982_Bak1_ | GCTGGGGACCGATCCTGATTGCTCGCTGCGG | 1260 |
| CasPhi32_exon3_sg4 | CGAGACGAGATGACATTAACCGGAGA | |
| R3983_Bak1_ | GCTGGGGACCGATCCTGATTGCTCGCTGCGG | 1261 |
| CasPhi32_exon3_sg5 | CGAGACTGGAACTCTGTGTCGTATCT | |
| R3984_Bak1_ | GCTGGGGACCGATCCTGATTGCTCGCTGCGG | 1262 |
| CasPhi32_exon3_sg6 | CGAGACCAGAATTTACTGGAGCAGCT | |
| R3985_Bak1_ | GCTGGGGACCGATCCTGATTGCTCGCTGCGG | 1263 |
| CasPhi32_exon3_sg7 | CGAGACACTGGAGCAGCTGCAGCCCA | |
| R3986_Bak1_ | GCTGGGGACCGATCCTGATTGCTCGCTGCGG | 1264 |
| CasPhi32_exon3_sg8 | CGAGACCCAGCTGTGGGCTGCAGCTG | |
| R3987_Bak1_ | GCTGGGGACCGATCCTGATTGCTCGCTGCGG | 1265 |
| CasPhi32_exon3_sg9 | CGAGACGTAGGCATTCCCAGCTGTGG | |
| R3988_Bak1_ | GCTGGGGACCGATCCTGATTGCTCGCTGCGG | 1266 |
| CasPhi32_exon3_ | CGAGACGTGAAGAGTTCGTAGGCATT | |
| sg10 | | |
| R3989_Bak1_ | GCTGGGGACCGATCCTGATTGCTCGCTGCGG | 1267 |
| CasPhi32_exon3_ | CGAGACACCAAGATTGCCTCCAGGTA | |
| sg11 | | |
| R3990_Bak1_ | GCTGGGGACCGATCCTGATTGCTCGCTGCGG | 1268 |
| CasPhi32_exon3_ | CGAGACCCTCCAGGTACCCACCACCA | |
| sg12 | | |

TABLE U
CasΦ.12 gRNAs targeting Bax in CHO cells

| | Repeat + spacer RNA Sequence (5′ → 3′), | |
|---|---|---|
| Name | shown as DNA | SEQ ID NO |
| R2458 | CTTTCAAGACTAATAGATTGCTCCTTACGAG | 1269 |
| Bax_CasPhi12_1 | GAGACCTAATGTGGATACTAACTCC | |
| R2459 | CTTTCAAGACTAATAGATTGCTCCTTACGAG | 1270 |
| Bax_CasPhi12_2 | GAGACTTCCGTGTGGCAGCTGACAT | |
| R2460 | CTTTCAAGACTAATAGATTGCTCCTTACGAG | 1271 |
| Bax_CasPhi12_3 | GAGACCTGATGGCAACTTCAACTGG | |
| R2461 | CTTTCAAGACTAATAGATTGCTCCTTACGAG | 1272 |
| Bax_CasPhi12_4 | GAGACTACTTTGCTAGCAAACTGGT | |
| R2462 | CTTTCAAGACTAATAGATTGCTCCTTACGAG | 1273 |
| Bax_CasPhi12_5 | GAGACAGCACCAGTTTGCTAGCAAA | |
| R2463 | CTTTCAAGACTAATAGATTGCTCCTTACGAG | 1274 |
| Bax_CasPhi12_6 | GAGACAACTGGGGCCGGGTTGTTGC | |
| R2865_Bax_ | CTTTCAAGACTAATAGATTGCTCCTTACGAG | 1275 |
| CasPhi12_nsd_sg1 | GAGACTTCTCTTTCCTGTAGGATGA | |
| R2866_Bax_ | CTTTCAAGACTAATAGATTGCTCCTTACGAG | 1276 |
| CasPhi12_nsd_sg2 | GAGACTCTTTCCTGTAGGATGATTG | |
| R2867_Bax_ | CTTTCAAGACTAATAGATTGCTCCTTACGAG | 1277 |
| CasPhi12_nsd_sg3 | GAGACCCTGTAGGATGATTGCTAAT | |
| R2868_Bax_ | CTTTCAAGACTAATAGATTGCTCCTTACGAG | 1278 |
| CasPhi12_nsd_sg4 | GAGACCTGTAGGATGATTGCTAATG | |
| R2869_Bax_ | CTTTCAAGACTAATAGATTGCTCCTTACGAG | 1279 |
| CasPhi12_nsd_sg5 | GAGACCTAATGTGGATACTAACTCC | |
| R2870_Bax_ | CTTTCAAGACTAATAGATTGCTCCTTACGAG | 1280 |
| CasPhi12_nsd_sg6 | GAGACTTCCGTGTGGCAGCTGACAT | |
| R2871_Bax_ | CTTTCAAGACTAATAGATTGCTCCTTACGAG | 1281 |
| CasPhi12_nsd_sg7 | GAGACCGTGTGGCAGCTGACATGTT | |
| R2872_Bax_ | CTTTCAAGACTAATAGATTGCTCCTTACGAG | 1282 |
| CasPhi12_nsd_sg8 | GAGACCCATCAGCAAACATGTCAGC | |
| R2873_Bax_ | CTTTCAAGACTAATAGATTGCTCCTTACGAG | 1283 |
| CasPhi12_nsd_sg9 | GAGACAAGTTGCCATCAGCAAACAT | |
| R2874_Bax_ | CTTTCAAGACTAATAGATTGCTCCTTACGAG | 1284 |
| CasPhi12_nsd_sg10 | GAGACGCTGATGGCAACTTCAACTG | |
| R2875_Bax_ | CTTTCAAGACTAATAGATTGCTCCTTACGAG | 1285 |
| CasPhi12_nsd_sg11 | GAGACCTGATGGCAACTTCAACTGG | |
| R2876_Bax_ | CTTTCAAGACTAATAGATTGCTCCTTACGAG | 1286 |
| CasPhi12_nsd_sg12 | GAGACAACTGGGGCCGGGTTGTTGC | |
| R2877_Bax_ | CTTTCAAGACTAATAGATTGCTCCTTACGAG | 1287 |
| CasPhi12_nsd_sg13 | GAGACTTGCCCTTTTCTACTTTGCT | |
| R2878_Bax_ | CTTTCAAGACTAATAGATTGCTCCTTACGAG | 1288 |
| CasPhi12_nsd_sg14 | GAGACCCCTTTTCTACTTTGCTAGC | |
| R2879_Bax_ | CTTTCAAGACTAATAGATTGCTCCTTACGAG | 1289 |
| CasPhi12_nsd_sg15 | GAGACCTAGCAAAGTAGAAAAGGGC | |
| R2880_Bax_ | CTTTCAAGACTAATAGATTGCTCCTTACGAG | 1290 |
| CasPhi12_nsd_sg16 | GAGACGCTAGCAAAGTAGAAAAGGG | |
| R2881_Bax_ | CTTTCAAGACTAATAGATTGCTCCTTACGAG | 1291 |
| CasPhi12_nsd_sg17 | GAGACTCTACTTTGCTAGCAAACTG | |
| R2882_Bax_ | CTTTCAAGACTAATAGATTGCTCCTTACGAG | 1292 |
| CasPhi12_nsd_sg18 | GAGACCTACTTTGCTAGCAAACTGG | |
| R2883_Bax_ | CTTTCAAGACTAATAGATTGCTCCTTACGAG | 1293 |
| CasPhi12_nsd_sg19 | GAGACTACTTTGCTAGCAAACTGGT | |
| R2884_Bax_ | CTTTCAAGACTAATAGATTGCTCCTTACGAG | 1294 |
| CasPhi12_nsd_sg20 | GAGACGCTAGCAAACTGGTGCTCAA | |
| R2885_Bax_ | CTTTCAAGACTAATAGATTGCTCCTTACGAG | 1295 |
| CasPhi12_nsd_sg21 | GAGACCTAGCAAACTGGTGCTCAAG | |
| R2886_Bax_ | CTTTCAAGACTAATAGATTGCTCCTTACGAG | 1296 |
| CasPhi12_nsd_sg22 | GAGACAGCACCAGTTTGCTAGCAAA | |

TABLE V
CasΦ.32 gRNAs targeting Bax in CHO cells

| | Repeat + spacer RNA Sequence (5′ → 3′), | |
|---|---|---|
| Name | shown as DNA | SEQ ID NO |
| R2458 | GCTGGGGACCGATCCTGATTGCTCGCTGCG | 1297 |
| Bax CasPhi32_1 | GCGAGACCTAATGTGGATACTAACTCC | |
| R2459 | GCTGGGGACCGATCCTGATTGCTCGCTGCG | 1298 |
| Bax CasPhi32_2 | GCGAGACTTCCGTGTGGCAGCTGACAT | |
| R2460 | GCTGGGGACCGATCCTGATTGCTCGCTGCG | 1299 |
| Bax CasPhi32_3 | GCGAGACCTGATGGCAACTTCAACTGG | |
| R2461 | GCTGGGGACCGATCCTGATTGCTCGCTGCG | 1300 |
| Bax CasPhi32_4 | GCGAGACTACTTTGCTAGCAAACTGGT | |
| R2462 | GCTGGGGACCGATCCTGATTGCTCGCTGCG | 1301 |
| Bax CasPhi32_5 | GCGAGACAGCACCAGTTTGCTAGCAAA | |
| R2463 | GCTGGGGACCGATCCTGATTGCTCGCTGCG | 1302 |
| Bax CasPhi32_6 | GCGAGACAACTGGGGCCGGGTTGTTGC | |
| R2865_Bax_ | GCTGGGGACCGATCCTGATTGCTCGCTGCG | 1303 |
| CasPhi32_nsd_sg1 | GCGAGACTTCTCTTTCCTGTAGGATGA | |
| R2866_Bax_ | GCTGGGGACCGATCCTGATTGCTCGCTGCG | 1304 |
| CasPhi32_nsd_sg2 | GCGAGACTCTTTCCTGTAGGATGATTG | |
| R2867_Bax_ | GCTGGGGACCGATCCTGATTGCTCGCTGCG | 1305 |
| CasPhi32_nsd_sg3 | GCGAGACCCTGTAGGATGATTGCTAAT | |
| R2868_Bax_ | GCTGGGGACCGATCCTGATTGCTCGCTGCG | 1306 |
| CasPhi32_nsd_sg4 | GCGAGACCTGTAGGATGATTGCTAATG | |
| R2869_Bax_ | GCTGGGGACCGATCCTGATTGCTCGCTGCG | 1307 |
| CasPhi32_nsd_sg5 | GCGAGACCTAATGTGGATACTAACTCC | |
| R2870_Bax_ | GCTGGGGACCGATCCTGATTGCTCGCTGCG | 1308 |
| CasPhi32_nsd_sg6 | GCGAGACTTCCGTGTGGCAGCTGACAT | |
| R2871_Bax_ | GCTGGGGACCGATCCTGATTGCTCGCTGCG | 1309 |
| CasPhi32_nsd_sg7 | GCGAGACCGTGTGGCAGCTGACATGTT | |
| R2872_Bax_ | GCTGGGGACCGATCCTGATTGCTCGCTGCG | 1310 |
| CasPhi32_nsd_sg8 | GCGAGACCCATCAGCAAACATGTCAGC | |
| R2873_Bax_ | GCTGGGGACCGATCCTGATTGCTCGCTGCG | 1311 |
| CasPhi32_nsd_sg9 | GCGAGACAAGTTGCCATCAGCAAACAT | |
| R2874_Bax_ | GCTGGGGACCGATCCTGATTGCTCGCTGCG | 1312 |
| CasPhi32_nsd_sg10 | GCGAGACGCTGATGGCAACTTCAACTG | |
| R2875_Bax_ | GCTGGGGACCGATCCTGATTGCTCGCTGCG | 1313 |
| CasPhi32_nsd_sg11 | GCGAGACCTGATGGCAACTTCAACTGG | |
| R2876_Bax_ | GCTGGGGACCGATCCTGATTGCTCGCTGCG | 1314 |
| CasPhi32_nsd_sg12 | GCGAGACAACTGGGGCCGGGTTGTTGC | |
| R2877_Bax_ | GCTGGGGACCGATCCTGATTGCTCGCTGCG | 1315 |
| CasPhi32_nsd_sg13 | GCGAGACTTGCCCTTTTCTACTTTGCT | |
| R2878_Bax_ | GCTGGGGACCGATCCTGATTGCTCGCTGCG | 1316 |
| CasPhi32_nsd_sg14 | GCGAGACCCCTTTTCTACTTTGCTAGC | |
| R2879_Bax_ | GCTGGGGACCGATCCTGATTGCTCGCTGCG | 1317 |
| CasPhi32_nsd_sg15 | GCGAGACCTAGCAAAGTAGAAAAGGGC | |
| R2880_Bax_ | GCTGGGGACCGATCCTGATTGCTCGCTGCG | 1318 |
| CasPhi32_nsd_sg16 | GCGAGACGCTAGCAAAGTAGAAAAGGG | |
| R2881_Bax_ | GCTGGGGACCGATCCTGATTGCTCGCTGCG | 1319 |
| CasPhi32_nsd_sg17 | GCGAGACTCTACTTTGCTAGCAAACTG | |
| R2882_Bax_ | GCTGGGGACCGATCCTGATTGCTCGCTGCG | 1320 |
| CasPhi32_nsd_sg18 | GCGAGACCTACTTTGCTAGCAAACTGG | |
| R2883_Bax_ | GCTGGGGACCGATCCTGATTGCTCGCTGCG | 1321 |
| CasPhi32_nsd_sg19 | GCGAGACTACTTTGCTAGCAAACTGGT | |
| R2884_Bax_ | GCTGGGGACCGATCCTGATTGCTCGCTGCG | 1322 |
| CasPhi32_nsd_sg20 | GCGAGACGCTAGCAAACTGGTGCTCAA | |
| R2885_Bax_ | GCTGGGGACCGATCCTGATTGCTCGCTGCG | 1323 |
| CasPhi32_nsd_sg21 | GCGAGACCTAGCAAACTGGTGCTCAAG | |
| R2886_Bax_ | GCTGGGGACCGATCCTGATTGCTCGCTGCG | 1324 |
| CasPhi32_nsd_sg22 | GCGAGACAGCACCAGTTTGCTAGCAAA | |

TABLE W
CasΦ.12 gRNAs targeting_Fut8 in CHO cells

| | Repeat + spacer RNA Sequence (5′ → 3′), | |
|---|---|---|
| Name | shown as DNA | SEQ ID NO |
| R2464 | CTTTCAAGACTAATAGATTGCTCCTTACGAG | 1325 |
| Fut8_CasPhi12_1 | GAGACCCACTTTGTCAGTGCGTCTG | |
| R2465 | CTTTCAAGACTAATAGATTGCTCCTTACGAG | 1326 |
| Fut8_CasPhi12_2 | GAGACCTCAATGGGATGGAAGGCTG | |
| R2466 | CTTTCAAGACTAATAGATTGCTCCTTACGAG | 1327 |
| Fut8_CasPhi12_3 | GAGACAGGAATACATGGTACACGTT | |
| R2467 | CTTTCAAGACTAATAGATTGCTCCTTACGAG | 1328 |
| Fut8_CasPhi12_4 | GAGACAAGAACATTTTCAGCTTCTC | |
| R2468 | CTTTCAAGACTAATAGATTGCTCCTTACGAG | 1329 |
| Fut8_CasPhi12_5 | GAGACATCCACTTTCATTCTGCGTT | |
| R2469 | CTTTCAAGACTAATAGATTGCTCCTTACGAG | 1330 |
| Fut8_CasPhi12_6 | GAGACTTTGTTAAAGGAGGCAAAGA | |
| R2887_Fut8__ | CTTTCAAGACTAATAGATTGCTCCTTACGAG | 1331 |
| CasPhi12_nsd_sg1 | GAGACTCCCCAGAGTCCATGTCAGA | |
| R2888_Fut8_ | CTTTCAAGACTAATAGATTGCTCCTTACGAG | 1332 |
| CasPhi12_nsd_sg2 | GAGACTCAGTGCGTCTGACATGGAC | |
| R2889_Fut8__ | CTTTCAAGACTAATAGATTGCTCCTTACGAG | 1333 |
| CasPhi12_nsd_sg3 | GAGACGTCAGTGCGTCTGACATGGA | |
| R2890_Fut8_ | CTTTCAAGACTAATAGATTGCTCCTTACGAG | 1334 |
| CasPhi12_nsd_sg4 | GAGACCCACTTTGTCAGTGCGTCTG | |
| R2891_Fut8_ | CTTTCAAGACTAATAGATTGCTCCTTACGAG | 1335 |
| CasPhi12_nsd_sg5 | GAGACTGTTCCCACTTTGTCAGTGC | |
| R2892_Fut8_ | CTTTCAAGACTAATAGATTGCTCCTTACGAG | 1336 |
| CasPhi12_nsd_sg6 | GAGACCTCAATGGGATGGAAGGCTG | |
| R2893_Fut8_ | CTTTCAAGACTAATAGATTGCTCCTTACGAG | 1337 |
| CasPhi12_nsd_sg7 | GAGACCATCCCATTGAGGAATACAT | |
| R2894_Fut8_ | CTTTCAAGACTAATAGATTGCTCCTTACGAG | 1338 |
| CasPhi12_nsd_sg8 | GAGACAGGAATACATGGTACACGTT | |
| R2895_Fut8_ | CTTTCAAGACTAATAGATTGCTCCTTACGAG | 1339 |
| CasPhi12_nsd_sg9 | GAGACAACGTGTACCATGTATTCCT | |
| R2896_Fut8_ | CTTTCAAGACTAATAGATTGCTCCTTACGAG | 1340 |
| CasPhi12_nsd_sg10 | GAGACTTCAACGTGTACCATGTATT | |
| R2897_Fut8_ | CTTTCAAGACTAATAGATTGCTCCTTACGAG | 1341 |
| CasPhi12_nsd_sg11 | GAGACAAGAACATTTTCAGCTTCTC | |
| R2898_Fut8_ | CTTTCAAGACTAATAGATTGCTCCTTACGAG | 1342 |
| CasPhi12_nsd_sg12 | GAGACGAGAAGCTGAAAATGTTCTT | |
| R2899_Fut8_ | CTTTCAAGACTAATAGATTGCTCCTTACGAG | 1343 |
| CasPhi12_nsd_sg13 | GAGACTCAGCTTCTCGAACGCAGAA | |
| R2900_Fut8_ | CTTTCAAGACTAATAGATTGCTCCTTACGAG | 1344 |
| CasPhi12_nsd_sg14 | GAGACCAGCTTCTCGAACGCAGAAT | |
| R2901_Fut8_ | CTTTCAAGACTAATAGATTGCTCCTTACGAG | 1345 |
| CasPhi12_nsd_sg15 | GAGACTGCGTTCGAGAAGCTGAAAA | |
| R2902_Fut8_ | CTTTCAAGACTAATAGATTGCTCCTTACGAG | 1346 |
| CasPhi12_nsd_sg16 | GAGACAGCTTCTCGAACGCAGAATG | |
| R2903_Fut8_ | CTTTCAAGACTAATAGATTGCTCCTTACGAG | 1347 |
| CasPhi12_nsd_sg17 | GAGACATTCTGCGTTCGAGAAGCTG | |
| R2904_Fut8_ | CTTTCAAGACTAATAGATTGCTCCTTACGAG | 1348 |
| CasPhi12_nsd_sg18 | GAGACCATTCTGCGTTCGAGAAGCT | |
| R2905_Fut8_ | CTTTCAAGACTAATAGATTGCTCCTTACGAG | 1349 |
| CasPhi12_nsd_sg19 | GAGACTCGAACGCAGAATGAAAGTG | |
| R2906_Fut8_ | CTTTCAAGACTAATAGATTGCTCCTTACGAG | 1350 |
| CasPhi12_nsd_sg20 | GAGACATCCACTTTCATTCTGCGTT | |
| R2907_Fut8_ | CTTTCAAGACTAATAGATTGCTCCTTACGAG | 1351 |
| CasPhi12_nsd_sg21 | GAGACTATCCACTTTCATTCTGCGT | |
| R2908_Fut8_ | CTTTCAAGACTAATAGATTGCTCCTTACGAG | 1352 |
| CasPhi12_nsd_sg22 | GAGACTTATCCACTTTCATTCTGCG | |
| R2909_Fut8_ | CTTTCAAGACTAATAGATTGCTCCTTACGAG | 1353 |
| CasPhi12_nsd_sg23 | GAGACTTTATCCACTTTCATTCTGC | |
| R2910_Fut8_ | CTTTCAAGACTAATAGATTGCTCCTTACGAG | 1354 |
| CasPhi12_nsd_sg24 | GAGACTTTTATCCACTTTCATTCTG | |
| R2911_Fut8_ | CTTTCAAGACTAATAGATTGCTCCTTACGAG | 1355 |
| CasPhi12_nsd_sg25 | GAGACAACAAAGAAGGGTCATCAGT | |
| R2912_Fut8_ | CTTTCAAGACTAATAGATTGCTCCTTACGAG | 1356 |
| CasPhi12_nsd_sg26 | GAGACCCTCCTTTAACAAAGAAGGG | |
| R2913_Fut8_ | CTTTCAAGACTAATAGATTGCTCCTTACGAG | 1357 |
| CasPhi12_nsd_sg27 | GAGACGCCTCCTTTAACAAAGAAGG | |
| R2914_Fut8_ | CTTTCAAGACTAATAGATTGCTCCTTACGAG | 1358 |
| CasPhi12_nsd_sg28 | GAGACTTTGTTAAAGGAGGCAAAGA | |
| R2915_Fut8_ | CTTTCAAGACTAATAGATTGCTCCTTACGAG | 1359 |
| CasPhi12_nsd_sg29 | GAGACGTTAAAGGAGGCAAAGACAA | |
| R2916_Fut8_ | CTTTCAAGACTAATAGATTGCTCCTTACGAG | 1360 |
| CasPhi12_nsd_sg30 | GAGACTTAAAGGAGGCAAAGACAAA | |
| R2917_Fut8_ | CTTTCAAGACTAATAGATTGCTCCTTACGAG | 1361 |
| CasPhi12_nsd_sg31 | GAGACTCTTTGCCTCCTTTAACAAA | |
| R2918_Fut8_ | CTTTCAAGACTAATAGATTGCTCCTTACGAG | 1362 |
| CasPhi12_nsd_sg32 | GAGACGTCTTTGCCTCCTTTAACAA | |
| R2919_Fut8_ | CTTTCAAGACTAATAGATTGCTCCTTACGAG | 1363 |
| CasPhi12_nsd_sg33 | GAGACGTCTAACTTACTTTGTCTTT | |
| R2920_Fut8_ | CTTTCAAGACTAATAGATTGCTCCTTACGAG | 1364 |
| CasPhi12_nsd_sg34 | GAGACTTGGTCTAACTTACTTTGTC | |

TABLE X
CasΦ.32 gRNAs targeting_Fut8 in CHO cells

| | Repeat + spacer RNA Sequence (5′ → 3′), | |
|---|---|---|
| Name | shown as DNA | SEQ ID NO |
| R2464 | GCTGGGGACCGATCCTGATTGCTCGCTGCG | 1365 |
| Fut8_CasPhi32_1 | GCGAGACCCACTTTGTCAGTGCGTCTG | |
| R2465 | GCTGGGGACCGATCCTGATTGCTCGCTGCG | 1366 |
| Fut8_CasPhi32_2 | GCGAGACCTCAATGGGATGGAAGGCTG | |
| R2466 | GCTGGGGACCGATCCTGATTGCTCGCTGCG | 1367 |
| Fut8_CasPhi32_3 | GCGAGACAGGAATACATGGTACACGTT | |
| R2467 | GCTGGGGACCGATCCTGATTGCTCGCTGCG | 1368 |
| Fut8_CasPhi32_4 | GCGAGACAAGAACATTTTCAGCTTCTC | |
| R2468 | GCTGGGGACCGATCCTGATTGCTCGCTGCG | 1369 |
| Fut8_CasPhi32_5 | GCGAGACATCCACTTTCATTCTGCGTT | |
| R2469 | GCTGGGGACCGATCCTGATTGCTCGCTGCG | 1370 |
| Fut8_CasPhi32_6 | GCGAGACTTTGTTAAAGGAGGCAAAGA | |
| R2887_Fut8__ | GCTGGGGACCGATCCTGATTGCTCGCTGCG | 1371 |
| CasPhi32_nsd_sg1 | GCGAGACTCCCCAGAGTCCATGTCAGA | |
| R2888_Fut8_ | GCTGGGGACCGATCCTGATTGCTCGCTGCG | 1372 |
| CasPhi32_nsd_sg2 | GCGAGACTCAGTGCGTCTGACATGGAC | |
| R2889_Fut8_ | GCTGGGGACCGATCCTGATTGCTCGCTGCG | 1373 |
| CasPhi32_nsd_sg3 | GCGAGACGTCAGTGCGTCTGACATGGA | |
| R2890_Fut8_ | GCTGGGGACCGATCCTGATTGCTCGCTGCG | 1374 |
| CasPhi32_nsd_sg4 | GCGAGACCCACTTTGTCAGTGCGTCTG | |
| R2891_Fut8_ | GCTGGGGACCGATCCTGATTGCTCGCTGCG | 1375 |
| CasPhi32_nsd_sg5 | GCGAGACTGTTCCCACTTTGTCAGTGC | |
| R2892_Fut8_ | GCTGGGGACCGATCCTGATTGCTCGCTGCG | 1376 |
| CasPhi32_nsd_sg6 | GCGAGACCTCAATGGGATGGAAGGCTG | |
| R2893_Fut8_ | GCTGGGGACCGATCCTGATTGCTCGCTGCG | 1377 |
| CasPhi32_nsd_sg7 | GCGAGACCATCCCATTGAGGAATACAT | |
| R2894_Fut8_ | GCTGGGGACCGATCCTGATTGCTCGCTGCG | 1378 |
| CasPhi32_nsd_sg8 | GCGAGACAGGAATACATGGTACACGTT | |
| R2895_Fut8_ | GCTGGGGACCGATCCTGATTGCTCGCTGCG | 1379 |
| CasPhi32_nsd_sg9 | GCGAGACAACGTGTACCATGTATTCCT | |
| R2896_Fut8_ | GCTGGGGACCGATCCTGATTGCTCGCTGCG | 1380 |
| CasPhi32_nsd_sg10 | GCGAGACTTCAACGTGTACCATGTATT | |
| R2897_Fut8_ | GCTGGGGACCGATCCTGATTGCTCGCTGCG | 1381 |
| CasPhi32_nsd_sg11 | GCGAGACAAGAACATTTTCAGCTTCTC | |
| R2898_Fut8_ | GCTGGGGACCGATCCTGATTGCTCGCTGCG | 1382 |
| CasPhi32_nsd_sg12 | GCGAGACGAGAAGCTGAAAATGTTCTT | |
| R2899_Fut8_ | GCTGGGGACCGATCCTGATTGCTCGCTGCG | 1383 |
| CasPhi32_nsd_sg13 | GCGAGACTCAGCTTCTCGAACGCAGAA | |
| R2900_Fut8_ | GCTGGGGACCGATCCTGATTGCTCGCTGCG | 1384 |
| CasPhi32_nsd_sg14 | GCGAGACCAGCTTCTCGAACGCAGAAT | |
| R2901_Fut8_ | GCTGGGGACCGATCCTGATTGCTCGCTGCG | 1385 |
| CasPhi32_nsd_sg15 | GCGAGACTGCGTTCGAGAAGCTGAAAA | |
| R2902_Fut8_ | GCTGGGGACCGATCCTGATTGCTCGCTGCG | 1386 |
| CasPhi32_nsd_sg16 | GCGAGACAGCTTCTCGAACGCAGAATG | |
| R2903_Fut8_ | GCTGGGGACCGATCCTGATTGCTCGCTGCG | 1387 |
| CasPhi32_nsd_sg17 | GCGAGACATTCTGCGTTCGAGAAGCTG | |
| R2904_Fut8_ | GCTGGGGACCGATCCTGATTGCTCGCTGCG | 1388 |
| CasPhi32_nsd_sg18 | GCGAGACCATTCTGCGTTCGAGAAGCT | |
| R2905_Fut8 | GCTGGGGACCGATCCTGATTGCTCGCTGCG | 1389 |
| CasPhi32_nsd_sg19 | GCGAGACTCGAACGCAGAATGAAAGTG | |
| R2906_Fut8_ | GCTGGGGACCGATCCTGATTGCTCGCTGCG | 1390 |
| CasPhi32_ | GCGAGACATCCACTTTCATTCTGCGTT | |
| CasPhi32_nsd_sg20 | | |
| R2907_Fut8_ | GCTGGGGACCGATCCTGATTGCTCGCTGCG | 1391 |
| CasPhi32_nsd_sg21 | GCGAGACTATCCACTTTCATTCTGCGT | |
| R2908_Fut8_ | GCTGGGGACCGATCCTGATTGCTCGCTGCG | 1392 |
| CasPhi32_nsd_sg22 | GCGAGACTTATCCACTTTCATTCTGCG | |
| R2909_Fut8_ | GCTGGGGACCGATCCTGATTGCTCGCTGCG | 1393 |
| CasPhi32_nsd_sg23 | GCGAGACTTTATCCACTTTCATTCTGC | |
| R2910_Fut8_ | GCTGGGGACCGATCCTGATTGCTCGCTGCG | 1394 |
| CasPhi32_nsd_sg24 | GCGAGACTTTTATCCACTTTCATTCTG | |
| R2911_Fut8_ | GCTGGGGACCGATCCTGATTGCTCGCTGCG | 1395 |
| CasPhi32_nsd_sg25 | GCGAGACAACAAAGAAGGGTCATCAGT | |
| R2912_Fut8_ | GCTGGGGACCGATCCTGATTGCTCGCTGCG | 1396 |
| CasPhi32_nsd_sg26 | GCGAGACCCTCCTTTAACAAAGAAGGG | |
| R2913_Fut8_ | GCTGGGGACCGATCCTGATTGCTCGCTGCG | 1397 |
| CasPhi32_nsd_sg27 | GCGAGACGCCTCCTTTAACAAAGAAGG | |
| R2914_Fut8_ | GCTGGGGACCGATCCTGATTGCTCGCTGCG | 1398 |
| CasPhi32_nsd_sg28 | GCGAGACTTTGTTAAAGGAGGCAAAGA | |
| R2915_Fut8_ | GCTGGGGACCGATCCTGATTGCTCGCTGCG | 1399 |
| CasPhi32_nsd_sg29 | GCGAGACGTTAAAGGAGGCAAAGACAA | |
| R2916_Fut8_ | GCTGGGGACCGATCCTGATTGCTCGCTGCG | 1400 |
| CasPhi32_nsd_sg30 | GCGAGACTTAAAGGAGGCAAAGACAAA | |
| R2917_Fut8_ | GCTGGGGACCGATCCTGATTGCTCGCTGCG | 1401 |
| CasPhi32_nsd_sg31 | GCGAGACTCTTTGCCTCCTTTAACAAA | |
| R2918_Fut8_ | GCTGGGGACCGATCCTGATTGCTCGCTGCG | 1402 |
| CasPhi32_nsd_sg32 | GCGAGACGTCTTTGCCTCCTTTAACAA | |
| R2919_Fut8_ | GCTGGGGACCGATCCTGATTGCTCGCTGCG | 1403 |
| CasPhi32_nsd_sg33 | GCGAGACGTCTAACTTACTTTGTCTTT | |
| R2920_Fut8_ | GCTGGGGACCGATCCTGATTGCTCGCTGCG | 1404 |
| CasPhi32_nsd_sg34 | GCGAGACTTGGTCTAACTTACTTTGTC | |

TABLE Y
CasΦ.12 gRNAs targeting human TRAC in T cells

| | Repeat + spacer RNA Sequence (5′ → 3′), | |
|---|---|---|
| Name | shown as DNA | SEQ ID NO |
| R3040_CasPhi12_S | ATTGCTCCTTACGAGGAGACTGGATATCTGT | 1533 |
| | GGGACA | |
| R3041_CasPhi12_S | ATTGCTCCTTACGAGGAGACTCCCACAGATA | 1534 |
| | TCCAGA | |
| R3042_CasPhi12_S | ATTGCTCCTTACGAGGAGACGAGTCTCTCAG | 1535 |
| | CTGGTA | |
| R3043_CasPhi12_S | ATTGCTCCTTACGAGGAGACAGAGTCTCTCA | 1536 |
| | GCTGGT | |
| R3044_CasPhi12_S | ATTGCTCCTTACGAGGAGACTCACTGGATTT | 1537 |
| | AGAGTC | |
| R3045_CasPhi12_S | ATTGCTCCTTACGAGGAGACAGAATCAAAAT | 1538 |
| | CGGTGA | |
| R3046_CasPhi12_S | ATTGCTCCTTACGAGGAGACGAGAATCAAAA | 1539 |
| | TCGGTG | |
| R3047_CasPhi12_S | ATTGCTCCTTACGAGGAGACACCGATTTTGA | 1540 |
| | TTCTCA | |
| R3048_CasPhi12_S | ATTGCTCCTTACGAGGAGACTTTGAGAATCA | 1541 |
| | AAATCG | |
| R3049_CasPhi12_S | ATTGCTCCTTACGAGGAGACGTTTGAGAATC | 1542 |
| | AAAATC | |
| R3050_CasPhi12_S | ATTGCTCCTTACGAGGAGACTGATTCTCAAA | 1543 |
| | CAAATG | |
| R3051_CasPhi12_S | ATTGCTCCTTACGAGGAGACGATTCTCAAAC | 1544 |
| | AAATGT | |
| R3052_CasPhi12_S | ATTGCTCCTTACGAGGAGACATTCTCAAACA | 1545 |
| | AATGTG | |
| R3053_CasPhi12_S | ATTGCTCCTTACGAGGAGACTGACACATTTG | 1546 |
| | TTTGAG | |
| R3054_CasPhi12_S | ATTGCTCCTTACGAGGAGACTCAAACAAATG | 1547 |
| | TGTCAC | |
| R3055_CasPhi12_S | ATTGCTCCTTACGAGGAGACGTGACACATTT | 1548 |
| | GTTTGA | |
| R3056_CasPhi12_S | ATTGCTCCTTACGAGGAGACCTTTGTGACAC | 1549 |
| | ATTTGT | |
| R3057_CasPhi12_S | ATTGCTCCTTACGAGGAGACTGATGTGTATA | 1550 |
| | TCACAG | |
| R3058_CasPhi12_S | ATTGCTCCTTACGAGGAGACTCTGTGATATA | 1551 |
| | CACATC | |
| R3059_CasPhi12_S | ATTGCTCCTTACGAGGAGACGTCTGTGATAT | 1552 |
| | ACACAT | |
| R3060_CasPhi12_S | ATTGCTCCTTACGAGGAGACTGTCTGTGATA | 1553 |
| | TACACA | |
| R3061_CasPhi12_S | ATTGCTCCTTACGAGGAGACAAGTCCATAGA | 1554 |
| | CCTCAT | |
| R3062_CasPhi12_S | ATTGCTCCTTACGAGGAGACCTCTTGAAGTC | 1555 |
| | CATAGA | |
| R3063_CasPhi12_S | ATTGCTCCTTACGAGGAGACAAGAGCAACAG | 1556 |
| | TGCTGT | |
| R3064_CasPhi12_S | ATTGCTCCTTACGAGGAGACCTCCAGGCCAC | 1557 |
| | AGCACT | |
| R3065_CasPhi12_S | ATTGCTCCTTACGAGGAGACTTGCTCCAGGC | 1558 |
| | CACAGC | |
| R3066_CasPhi12_S | ATTGCTCCTTACGAGGAGACGTTGCTCCAGG | 1559 |
| | CCACAG | |
| R3067_CasPhi12_S | ATTGCTCCTTACGAGGAGACCACATGCAAAG | 1560 |
| | TCAGAT | |
| R3068_CasPhi12_S | ATTGCTCCTTACGAGGAGACGCACATGCAAA | 1561 |
| | GTCAGA | |
| R3069_CasPhi12_S | ATTGCTCCTTACGAGGAGACGCATGTGCAAA | 1562 |
| | CGCCTT | |
| R3070_CasPhi12_S | ATTGCTCCTTACGAGGAGACAAGGCGTTTGC | 1563 |
| | ACATGC | |
| R3071_CasPhi12_S | ATTGCTCCTTACGAGGAGACCATGTGCAAAC | 1564 |
| | GCCTTC | |
| R3072_CasPhi12_S | ATTGCTCCTTACGAGGAGACTTGAAGGCGTT | 1565 |
| | TGCACA | |
| R3073_CasPhi12_S | ATTGCTCCTTACGAGGAGACAACAACAGCAT | 1566 |
| | TATTCC | |
| R3074_CasPhi12_S | ATTGCTCCTTACGAGGAGACTGGAATAATGC | 1567 |
| | TGTTGT | |
| R3075_CasPhi12_S | ATTGCTCCTTACGAGGAGACTTCCAGAAGAC | 1568 |
| | ACCTTC | |
| R3076_CasPhi12_S | ATTGCTCCTTACGAGGAGACCAGAAGACACC | 1569 |
| | TTCTTC | |
| R3077_CasPhi12_S | ATTGCTCCTTACGAGGAGACCCTGGGCTGGG | 1570 |
| | GAAGAA | |
| R3078_CasPhi12_S | ATTGCTCCTTACGAGGAGACTTCCCCAGCCC | 1571 |
| | AGGTAA | |
| R3079_CasPhi12_S | ATTGCTCCTTACGAGGAGACCCCAGCCCAGG | 1572 |
| | TAAGGG | |
| R3080_CasPhi12_S | ATTGCTCCTTACGAGGAGACTAAAAGGAAAA | 1573 |
| | ACAGAC | |
| R3081_CasPhi12_S | ATTGCTCCTTACGAGGAGACCTAAAAGGAAA | 1574 |
| | AACAGA | |
| R3082_CasPhi12_S | ATTGCTCCTTACGAGGAGACTTCCTTTTAGAA | 1575 |
| | AGTTC | |
| R3083_CasPhi12_S | ATTGCTCCTTACGAGGAGACTCCTTTTAGAA | 1576 |
| | AGTTCC | |
| R3084_CasPhi12_S | ATTGCTCCTTACGAGGAGACCCTTTTAGAAA | 1577 |
| | GTTCCT | |
| R3085_CasPhi12_S | ATTGCTCCTTACGAGGAGACCTTTTAGAAAG | 1578 |
| | TTCCTG | |
| R3086_CasPhi12_S | ATTGCTCCTTACGAGGAGACTAGAAAGTTCC | 1579 |
| | TGTGAT | |
| R3136_CasPhi12_S | ATTGCTCCTTACGAGGAGACAGAAAGTTCCT | 1580 |
| | GTGATG | |
| R3137_CasPhi12_S | ATTGCTCCTTACGAGGAGACGAAAGTTCCTG | 1581 |
| | TGATGT | |
| R3138_CasPhi12_S | ATTGCTCCTTACGAGGAGACACATCACAGGA | 1582 |
| | ACTTTC | |
| R3139_CasPhi12_S | ATTGCTCCTTACGAGGAGACCTGTGATGTCA | 1583 |
| | AGCTGG | |
| R3140_CasPhi12_S | ATTGCTCCTTACGAGGAGACTCGACCAGCTT | 1584 |
| | GACATC | |
| R3141_CasPhi12_S | ATTGCTCCTTACGAGGAGACCTCGACCAGCT | 1585 |
| | TGACAT | |
| R3142_CasPhi12_S | ATTGCTCCTTACGAGGAGACTCTCGACCAGC | 1586 |
| | TTGACA | |
| R3143_CasPhi12_S | ATTGCTCCTTACGAGGAGACAAAGCTTTTCT | 1587 |
| | CGACCA | |
| R3144_CasPhi12_S | ATTGCTCCTTACGAGGAGACCAAAGCTTTTC | 1588 |
| | TCGACC | |
| R3145_CasPhi12_S | ATTGCTCCTTACGAGGAGACCCTGTTTCAAA | 1589 |
| | GCTTTT | |
| R3146_CasPhi12_S | ATTGCTCCTTACGAGGAGACGAAACAGGTAA | 1590 |
| | GACAGG | |
| R3147_CasPhi12_S | ATTGCTCCTTACGAGGAGACAAACAGGTAAG | 1591 |
| | ACAGGG | |

TABLE Z
CasΦ.12 gRNAs targeting human B2M in T cells

| | Repeat + spacer RNA Sequence (5′ → 3′), | |
|---|---|---|
| Name | shown as DNA | SEQ ID NO |
| R3115_CasPhi12_S | ATTGCTCCTTACGAGGAGACCATCCATCCGA | 1592 |
| | CATTGA | |
| R3116_CasPhi12_S | ATTGCTCCTTACGAGGAGACATCCATCCGAC | 1593 |
| | ATTGAA | |
| R3117_CasPhi12_S | ATTGCTCCTTACGAGGAGACAGTAAGTCAAC | 1594 |
| | TTCAAT | |
| R3118_CasPhi12_S | ATTGCTCCTTACGAGGAGACTTCAGTAAGTC | 1595 |
| | AACTTC | |
| R3119_CasPhi12_S | ATTGCTCCTTACGAGGAGACAAGTTGACTTA | 1596 |
| | CTGAAG | |
| R3120_CasPhi12_S | ATTGCTCCTTACGAGGAGACACTTACTGAAG | 1597 |
| | AATGGA | |
| R3121_CasPhi12_S | ATTGCTCCTTACGAGGAGACTCTCTCCATTCT | 1598 |
| | TCAGT | |
| R3122_CasPhi12_S | ATTGCTCCTTACGAGGAGACCTGAAGAATGG | 1599 |
| | AGAGAG | |
| R3123_CasPhi12_S | ATTGCTCCTTACGAGGAGACAATTCTCTCTCC | 1600 |
| | ATTCT | |
| R3124_CasPhi12_S | ATTGCTCCTTACGAGGAGACCAATTCTCTCTC | 1601 |
| | CATTC | |
| R3125_CasPhi12_S | ATTGCTCCTTACGAGGAGACTCAATTCTCTCT | 1602 |
| | CCATT | |
| R3126_CasPhi12_S | ATTGCTCCTTACGAGGAGACTTCAATTCTCTC | 1603 |
| | TCCAT | |
| R3127_CasPhi12_S | ATTGCTCCTTACGAGGAGACAAAAAGTGGAG | 1604 |
| | CATTCA | |
| R3128_CasPhi12_S | ATTGCTCCTTACGAGGAGACCTGAAAGACAA | 1605 |
| | GTCTGA | |
| R3129_CasPhi12_S | ATTGCTCCTTACGAGGAGACAGACTTGTCTTT | 1606 |
| | CAGCA | |
| R3130_CasPhi12_S | ATTGCTCCTTACGAGGAGACTCTTTCAGCAA | 1607 |
| | GGACTG | |
| R3131_CasPhi12_S | ATTGCTCCTTACGAGGAGACCAGCAAGGACT | 1608 |
| | GGTCTT | |
| R3132_CasPhi12_S | ATTGCTCCTTACGAGGAGACAGCAAGGACTG | 1609 |
| | GTCTTT | |
| R3133_CasPhi12_S | ATTGCTCCTTACGAGGAGACCTATCTCTTGTA | 1610 |
| | CTACA | |
| R3134_CasPhi12_S | ATTGCTCCTTACGAGGAGACTATCTCTTGTAC | 1611 |
| | TACAC | |
| R3135_CasPhi12_S | ATTGCTCCTTACGAGGAGACAGTGTAGTACA | 1612 |
| | AGAGAT | |
| R3148_CasPhi12_S | ATTGCTCCTTACGAGGAGACTACTACACTGA | 1613 |
| | ATTCAC | |
| R3149_CasPhi12_S | ATTGCTCCTTACGAGGAGACAGTGGGGGTGA | 1614 |
| | ATTCAG | |
| R3150_CasPhi12_S | ATTGCTCCTTACGAGGAGACCAGTGGGGGTG | 1615 |
| | AATTCA | |
| R3151_CasPhi12_S | ATTGCTCCTTACGAGGAGACTCAGTGGGGGT | 1616 |
| | GAATTC | |
| R3152_CasPhi12_S | ATTGCTCCTTACGAGGAGACTTCAGTGGGGG | 1617 |
| | TGAATT | |
| R3153_CasPhi12_S | ATTGCTCCTTACGAGGAGACACCCCCACTGA | 1618 |
| | AAAAGA | |
| R3154_CasPhi12_S | ATTGCTCCTTACGAGGAGACACACGGCAGGC | 1619 |
| | ATACTC | |
| R3155_CasPhi12_S | ATTGCTCCTTACGAGGAGACGGCTGTGACAA | 1620 |
| | AGTCAC | |
| R3156_CasPhi12_S | ATTGCTCCTTACGAGGAGACGTCACAGCCCA | 1621 |
| | AGATAG | |
| R3157_CasPhi12_S | ATTGCTCCTTACGAGGAGACTCACAGCCCAA | 1622 |
| | GATAGT | |
| R3158_CasPhi12_S | ATTGCTCCTTACGAGGAGACACTATCTTGGG | 1623 |
| | CTGTGA | |
| R3159_CasPhi12_S | ATTGCTCCTTACGAGGAGACCCCCACTTAAC | 1624 |
| | TATCTT | |

TABLE AA
CasΦ.12 gRNAs targeting human PD1 in T cells

| Name | Repeat + spacer RNA Sequence (5′ → 3′) | SEQ ID NO |
|---|---|---|
| R2921_CasPhi12_S | AUUGCUCCUUACGAGGAGACCCUUCCGC | 1625 |
| | UCACCUCCG | |
| R2922_CasPhi12_S | AUUGCUCCUUACGAGGAGACCCUUCCGC | 1626 |
| | UCACCUCCG | |
| R2923_CasPhi12_S | AUUGCUCCUUACGAGGAGACCGCUCACC | 1627 |
| | UCCGCCUGA | |
| R2924_CasPhi12_S | AUUGCUCCUUACGAGGAGACUCCACUGC | 1628 |
| | UCAGGCGGA | |
| R2925_CasPhi12_S | AUUGCUCCUUACGAGGAGACUAGCACCG | 1629 |
| | CCCAGACGA | |
| R2926_CasPhi12_S | AUUGCUCCUUACGAGGAGACAGGCAUGC | 1630 |
| | AGAUCCCAC | |
| R2927_CasPhi12_S | AUUGCUCCUUACGAGGAGACCACAGGCG | 1631 |
| | CCCUGGCCA | |
| R2928_CasPhi12_S | AUUGCUCCUUACGAGGAGACUCUGGGCG | 1632 |
| | GUGCUACAA | |
| R2929_CasPhi12_S | AUUGCUCCUUACGAGGAGACGCAUGCCU | 1633 |
| | GGAGCAGCC | |
| R2930_CasPhi12_S | AUUGCUCCUUACGAGGAGACUAGCACCG | 1634 |
| | CCCAGACGA | |
| R2931_CasPhi12_S | AUUGCUCCUUACGAGGAGACUGGCCGCC | 1635 |
| | AGCCCAGUU | |
| R2932_CasPhi12_S | AUUGCUCCUUACGAGGAGACCUUCCGCU | 1636 |
| | CACCUCCGC | |
| R2933_CasPhi12_S | AUUGCUCCUUACGAGGAGACCAGGGCCU | 1637 |
| | GUCUGGGGA | |
| R2934_CasPhi12_S | AUUGCUCCUUACGAGGAGACUCCCCAGC | 1638 |
| | CCUGCUCGU | |
| R2935_CasPhi12_S | AUUGCUCCUUACGAGGAGACGGUCACCA | 1639 |
| | CGAGCAGGG | |
| R2936_CasPhi12_S | AUUGCUCCUUACGAGGAGACUCCCCUUC | 1640 |
| | GGUCACCAC | |
| R2937_CasPhi12_S | AUUGCUCCUUACGAGGAGACGAGAAGCU | 1641 |
| | GCAGGUGAA | |
| R2938_CasPhi12_S | AUUGCUCCUUACGAGGAGACACCUGCAG | 1642 |
| | CUUCUCCAA | |
| R2939_CasPhi12_S | AUUGCUCCUUACGAGGAGACUCCAACAC | 1643 |
| | AUCGGAGAG | |
| R2940_CasPhi12_S | AUUGCUCCUUACGAGGAGACGCACGAAG | 1644 |
| | CUCUCCGAU | |
| R2941_CasPhi12_S | AUUGCUCCUUACGAGGAGACAGCACGAA | 1645 |
| | GCUCUCCGA | |
| R2942_CasPhi12_S | AUUGCUCCUUACGAGGAGACGUGCUAAA | 1646 |
| | CUGGUACCG | |
| R2943_CasPhi12_S | AUUGCUCCUUACGAGGAGACCUGGGGCU | 1647 |
| | CAUGCGGUA | |
| R2944_CasPhi12_S | AUUGCUCCUUACGAGGAGACUCCGUCUG | 1648 |
| | GUUGCUGGG | |
| R2945_CasPhi12_S | AUUGCUCCUUACGAGGAGACCCCGAGGA | 1649 |
| | CCGCAGCCA | |
| R2946_CasPhi12_S | AUUGCUCCUUACGAGGAGACUGUGACAC | 1650 |
| | GGAAGCGGC | |
| R2947_CasPhi12_S | AUUGCUCCUUACGAGGAGACCGUGUCAC | 1651 |
| | ACAACUGCC | |
| R2948_CasPhi12_S | AUUGCUCCUUACGAGGAGACGGCAGUUG | 1652 |
| | UGUGACACG | |
| R2949_CasPhi12_S | AUUGCUCCUUACGAGGAGACCACAUGAG | 1653 |
| | CGUGGUCAG | |
| R2950_CasPhi12_S | AUUGCUCCUUACGAGGAGACCGCCGGGC | 1654 |
| | CCUGACCAC | |
| R2951_CasPhi12_S | AUUGCUCCUUACGAGGAGACGGGGCCAG | 1655 |
| | GGAGAUGGC | |
| R2952_CasPhi12_S | AUUGCUCCUUACGAGGAGACAUCUGCGC | 1656 |
| | CUUGGGGGC | |
| R2953_CasPhi12_S | AUUGCUCCUUACGAGGAGACGAUCUGCG | 1657 |
| | CCUUGGGGG | |
| R2954_CasPhi12_S | AUUGCUCCUUACGAGGAGACCCAGACAG | 1658 |
| | GCCCUGGAA | |
| R2955_CasPhi12_S | AUUGCUCCUUACGAGGAGACCCAGCCCU | 1659 |
| | GCUCGUGGU | |
| R2956_CasPhi12_S | AUUGCUCCUUACGAGGAGACUCUCUGGA | 1660 |
| | AGGGCACAA | |
| R2957_CasPhi12_S | AUUGCUCCUUACGAGGAGACGUGCCCUU | 1661 |
| | CCAGAGAGA | |
| R2958_CasPhi12_S | AUUGCUCCUUACGAGGAGACUGCCCUUC | 1662 |
| | CAGAGAGAA | |
| R2959_CasPhi12_S | AUUGCUCCUUACGAGGAGACUGCCCUUC | 1663 |
| | UCUCUGGAA | |
| R2960_CasPhi12_S | AUUGCUCCUUACGAGGAGACCAGAGAGA | 1664 |
| | AGGGCAGAA | |
| R2961_CasPhi12_S | AUUGCUCCUUACGAGGAGACGAACUGGC | 1665 |
| | CGGCUGGCC | |
| R2962_CasPhi12_S | AUUGCUCCUUACGAGGAGACGGAACUGG | 1666 |
| | CCGGCUGGC | |
| R2963_CasPhi12_S | AUUGCUCCUUACGAGGAGACCAAACCCU | 1667 |
| | GGUGGUUGG | |
| R2964_CasPhi12_S | AUUGCUCCUUACGAGGAGACGUGUCGUG | 1668 |
| | GGCGGCCUG | |
| R2965_CasPhi12_S | AUUGCUCCUUACGAGGAGACCCUCGUGC | 1669 |
| | GGCCCGGGA | |
| R2966_CasPhi12_S | AUUGCUCCUUACGAGGAGACUCCCUGCA | 1670 |
| | GAGAAACAC | |
| R2967_CasPhi12_S | AUUGCUCCUUACGAGGAGACCUCUGCAG | 1671 |
| | GGACAAUAG | |
| R2968_CasPhi12_S | AUUGCUCCUUACGAGGAGACUCUGCAGG | 1672 |
| | GACAAUAGG | |
| R2969_CasPhi12_S | AUUGCUCCUUACGAGGAGACCUCCUCAA | 1673 |
| | AGAAGGAGG | |
| R2970_CasPhi12_S | AUUGCUCCUUACGAGGAGACUCCUCAAA | 1674 |
| | GAAGGAGGA | |
| R2971_CasPhi12_S | AUUGCUCCUUACGAGGAGACUCUGUGGA | 1675 |
| | CUAUGGGGA | |
| R2972_CasPhi12_S | AUUGCUCCUUACGAGGAGACUCUCGCCA | 1676 |
| | CUGGAAAUC | |
| R2973_CasPhi12_S | AUUGCUCCUUACGAGGAGACCCAGUGGC | 1677 |
| | GAGAGAAGA | |
| R2974_CasPhi12_S | AUUGCUCCUUACGAGGAGACCAGUGGCG | 1678 |
| | AGAGAAGAC | |
| R2975_CasPhi12_S | AUUGCUCCUUACGAGGAGACCGCUAGGA | 1679 |
| | AAGACAAUG | |
| R2976_CasPhi12_S | AUUGCUCCUUACGAGGAGACUCUUUCCU | 1680 |
| | AGCGGAAUG | |
| R2977_CasPhi12_S | AUUGCUCCUUACGAGGAGACCCUAGCGG | 1681 |
| | AAUGGGCAC | |
| R2978_CasPhi12_S | AUUGCUCCUUACGAGGAGACCUAGCGGA | 1682 |
| | AUGGGCACC | |
| R2979_CasPhi12_S | AUUGCUCCUUACGAGGAGACGCCCCUCU | 1683 |
| | GACCGGCUU | |
| R2980_CasPhi12_S | AUUGCUCCUUACGAGGAGACCUUGGCCA | 1684 |
| | CCAGUGUUC | |
| R2981_CasPhi12_S | AUUGCUCCUUACGAGGAGACGCCACCAG | 1685 |
| | UGUUCUGCA | |
| R2982_CasPhi12_S | AUUGCUCCUUACGAGGAGACUGCAGACC | 1686 |
| | CUCCACCAU | |
| R2983_CasPhi12_S | AUUGCUCCUUACGAGGAGACUCCUGAGG | 1687 |
| | AAAUGCGCU | |
| R2984_CasPhi12_S | AUUGCUCCUUACGAGGAGACCCUCAGGA | 1688 |
| | GAAGCAGGC | |
| R2985_CasPhi12_S | AUUGCUCCUUACGAGGAGACCUCAGGAG | 1689 |
| | AAGCAGGCA | |
| R2986_CasPhi12_S | AUUGCUCCUUACGAGGAGACCAGGCCGU | 1690 |
| | CCAGGGGCU | |
| R2987_CasPhi12_S | AUUGCUCCUUACGAGGAGACAGACAUGA | 1691 |
| | GUCCUGUGG | |
| R2988_CasPhi12_S | AUUGCUCCUUACGAGGAGACAGGUCCUG | 1692 |
| | CCAGCACAG | |
| R2989_CasPhi12_S | AUUGCUCCUUACGAGGAGACAGGGAGCU | 1693 |
| | GGACGCAGG | |
| R2990_CasPhi12_S | AUUGCUCCUUACGAGGAGACAGCCCCGG | 1694 |
| | GCCGCAGGC | |
| R2991_CasPhi12_S | AUUGCUCCUUACGAGGAGACAGGCAGGA | 1695 |
| | GGCUCCGGG | |
| R2992_CasPhi12_S | AUUGCUCCUUACGAGGAGACGGGGCUGG | 1696 |
| | UUGGAGAUG | |
| R2993_CasPhi12_S | AUUGCUCCUUACGAGGAGACGAGAUGGC | 1697 |
| | CUUGGAGCA | |
| R2994_CasPhi12_S | AUUGCUCCUUACGAGGAGACGCUGCUCC | 1698 |
| | AAGGCCAUC | |
| R2995_CasPhi12_S | AUUGCUCCUUACGAGGAGACGAGCAGCC | 1699 |
| | AAGGUGCCC | |
| R2996_CasPhi12_S | AUUGCUCCUUACGAGGAGACGGGAUGCC | 1700 |
| | ACUGCCAGG | |
| R2997_CasPhi12_S | AUUGCUCCUUACGAGGAGACCGGGAUGC | 1701 |
| | CACUGCCAG | |
| R2998_CasPhi12_S | AUUGCUCCUUACGAGGAGACGGCCCUGC | 1702 |
| | GUCCAGGGC | |
| R2999_CasPhi12_S | AUUGCUCCUUACGAGGAGACUCUGCUCC | 1703 |
| | CUGCAGGCC | |
| R3000_CasPhi12_S | AUUGCUCCUUACGAGGAGACUCUAGGCC | 1704 |
| | UGCAGGGAG | |
| R3001_CasPhi12_S | AUUGCUCCUUACGAGGAGACCCUGAAAC | 1705 |
| | UUCUCUAGG | |
| R3002_CasPhi12_S | AUUGCUCCUUACGAGGAGACUGACCUUC | 1706 |
| | CCUGAAACU | |
| R3003_CasPhi12_S | AUUGCUCCUUACGAGGAGACCAGGGAAG | 1707 |
| | GUCAGAAGA | |
| R3004_CasPhi12_S | AUUGCUCCUUACGAGGAGACAGGGAAGG | 1708 |
| | UCAGAAGAG | |
| R3005_CasPhi12_S | AUUGCUCCUUACGAGGAGACCUGCCCUG | 1709 |
| | CCCACCACA | |
| R3006_CasPhi12_S | AUUGCUCCUUACGAGGAGACCCUGCCCU | 1710 |
| | GCCCACCAC | |
| R3007_CasPhi12_S | AUUGCUCCUUACGAGGAGACACACAUGC | 1711 |
| | CCAGGCAGC | |
| R3008_CasPhi12_S | AUUGCUCCUUACGAGGAGACCACAUGCC | 1712 |
| | CAGGCAGCA | |
| R3009_CasPhi12_S | AUUGCUCCUUACGAGGAGACCCUGCCCC | 1713 |
| | ACAAAGGGC | |
| R3010_CasPhi12_S | AUUGCUCCUUACGAGGAGACGUGGGGCA | 1714 |
| | GGGAAGCUG | |
| R3011_CasPhi12_S | AUUGCUCCUUACGAGGAGACUGGGGCAG | 1715 |
| | GGAAGCUGA | |
| R3012_CasPhi12_S | AUUGCUCCUUACGAGGAGACCUGCCUCA | 1716 |
| | GCUUCCCUG | |
| R3013_CasPhi12_S | AUUGCUCCUUACGAGGAGACCAGGCCCA | 1717 |
| | GCCAGCACU | |
| R3014_CasPhi12_S | AUUGCUCCUUACGAGGAGACAGGCCCAG | 1718 |
| | CCAGCACUC | |
| R3015_CasPhi12_S | AUUGCUCCUUACGAGGAGACCACCCCAG | 1719 |
| | CCCCUCACA | |
| R3016_CasPhi12_S | AUUGCUCCUUACGAGGAGACGGACCGUA | 1720 |
| | GGAUGUCCC | |

TABLE AB
shortened CasΦ.12 gRNAs targeting human CIITA

| Name | Repeat + spacer RNA Sequence (5′ → 3′) | SEQ ID NO |
|---|---|---|
| R4503_CasPhi12_ | AUUGCUCCUUACGAGGAGACCUACACAA | 1721 |
| C2TA_T1.1_S | UGCGUUGCC | |
| R4504_CasPhi12_ | AUUGCUCCUUACGAGGAGACGGGCUCUG | 1722 |
| C2TA_T1.2_S | ACAGGUAGG | |
| R4505_CasPhi12_ | AUUGCUCCUUACGAGGAGACUGUAGGAA | 1723 |
| C2TA_T1.3_S | UCCCAGCCA | |
| R4506_CasPhi12_ | AUUGCUCCUUACGAGGAGACCCUGGCUC | 1724 |
| C2TA_T1.8_S | CACGCCCUG | |
| R4507_CasPhi12_ | AUUGCUCCUUACGAGGAGACGGGAAGCU | 1725 |
| C2TA_T1.9_S | GAGGGCACG | |
| R4508_CasPhi12_ | AUUGCUCCUUACGAGGAGACACAGCGAU | 1726 |
| C2TA_T2.1_S | GCUGACCCC | |
| R4509_CasPhi12_ | AUUGCUCCUUACGAGGAGACUUAACAGC | 1727 |
| C2TA_T2.2_S | GAUGCUGAC | |
| R4510_CasPhi12_ | AUUGCUCCUUACGAGGAGACUAUGACCA | 1728 |
| C2TA_T2.3_S | GAUGGACCU | |
| R4511_CasPhi12_ | AUUGCUCCUUACGAGGAGACGGGCCCCU | 1729 |
| C2TA_T2.4_S | AGAAGGUGG | |
| R4512_CasPhi12_ | AUUGCUCCUUACGAGGAGACUAGGGGCC | 1730 |
| C2TA_T2.5_S | CCAACUCCA | |
| R4513_CasPhi12_ | AUUGCUCCUUACGAGGAGACAGAAGCUC | 1731 |
| C2TA_T2.6_S | CAGGUAGCC | |
| R4514_CasPhi12_ | AUUGCUCCUUACGAGGAGACUCCAGCCA | 1732 |
| C2TA_T2.7_S | GGUCCAUCU | |
| R4515_CasPhi12_ | AUUGCUCCUUACGAGGAGACUUCUCCAG | 1733 |
| C2TA_T2.8_S | CCAGGUCCA | |
| R5200_CasPhi12_S | AUUGCUCCUUACGAGGAGACAGCAGGCU | 2290 |
| | GUUGUGUGA | |
| R5201_CasPhi12_S | AUUGCUCCUUACGAGGAGACCAUGUCAC | 2291 |
| | ACAACAGCC | |
| R5202_CasPhi12_S | AUUGCUCCUUACGAGGAGACUGUGACAU | 2292 |
| | GGAAGGUGA | |
| R5203_CasPhi12_S | AUUGCUCCUUACGAGGAGACAUCACCUU | 2293 |
| | CCAUGUCAC | |
| R5204_CasPhi12_S | AUUGCUCCUUACGAGGAGACGCAUAAGC | 2294 |
| | CUCCCUGGU | |
| R5205_CasPhi12_S | AUUGCUCCUUACGAGGAGACCAGGACUC | 2295 |
| | CCAGCUGGA | |
| R5206_CasPhi12_S | AUUGCUCCUUACGAGGAGACCUCAGGCC | 2296 |
| | CUCCAGCUG | |
| R5207_CasPhi12_S | AUUGCUCCUUACGAGGAGACUGCUGGCA | 2297 |
| | UCUCCAUAC | |
| R5208_CasPhi12_S | AUUGCUCCUUACGAGGAGACUGCCCAAC | 2298 |
| | UUCUGCUGG | |
| R5209_CasPhi12_S | AUUGCUCCUUACGAGGAGACCUGCCCAA | 2299 |
| | CUUCUGCUG | |
| R5210_CasPhi12_S | AUUGCUCCUUACGAGGAGACUCUGCCCA | 2300 |
| | ACUUCUGCU | |
| R5211_CasPhi12_S | AUUGCUCCUUACGAGGAGACUGACUUUU | 2301 |
| | CUGCCCAAC | |
| R5212_CasPhi12_S | AUUGCUCCUUACGAGGAGACCUGACUUU | 2302 |
| | UCUGCCCAA | |
| R5213_CasPhi12_S | AUUGCUCCUUACGAGGAGACUCUGACUU | 2303 |
| | UUCUGCCCA | |
| R5214_CasPhi12_S | AUUGCUCCUUACGAGGAGACCCAGAGGA | 2304 |
| | GCUUCCGGC | |
| R5215_CasPhi12_S | AUUGCUCCUUACGAGGAGACAGGUCUGC | 2305 |
| | CGGAAGCUC | |
| R5216_CasPhi12_S | AUUGCUCCUUACGAGGAGACCGGCAGAC | 2306 |
| | CUGAAGCAC | |
| R5217_CasPhi12_S | AUUGCUCCUUACGAGGAGACCAGUGCUU | 2307 |
| | CAGGUCUGC | |
| R5218_CasPhi12_S | AUUGCUCCUUACGAGGAGACAACAGCGC | 2308 |
| | AGGCAGUGG | |
| R5219_CasPhi12_S | AUUGCUCCUUACGAGGAGACAACCAGGA | 2309 |
| | GCCAGCCUC | |
| R5220_CasPhi12_S | AUUGCUCCUUACGAGGAGACUCCAGGCG | 2310 |
| | CAUCUGGCC | |
| R5221_CasPhi12_S | AUUGCUCCUUACGAGGAGACCUCCAGGC | 2311 |
| | GCAUCUGGC | |
| R5222_CasPhi12_S | AUUGCUCCUUACGAGGAGACUCUCCAGG | 2312 |
| | CGCAUCUGG | |
| R5223_CasPhi12_S | AUUGCUCCUUACGAGGAGACCUCCAGUU | 2313 |
| | CCUCGUUGA | |
| R5224_CasPhi12_S | AUUGCUCCUUACGAGGAGACUCCAGUUC | 2314 |
| | CUCGUUGAG | |
| R5225_CasPhi12_S | AUUGCUCCUUACGAGGAGACAGGCAGCU | 2315 |
| | CAACGAGGA | |
| R5226_CasPhi12_S | AUUGCUCCUUACGAGGAGACCUCGUUGA | 2316 |
| | GCUGCCUGA | |
| R5227_CasPhi12_S | AUUGCUCCUUACGAGGAGACAGCUGCCU | 2317 |
| | GAAUCUCCC | |
| R5228_CasPhi12_S | AUUGCUCCUUACGAGGAGACGUCCCCAC | 2318 |
| | CAUCUCCAC | |
| R5229_CasPhi12_S | AUUGCUCCUUACGAGGAGACUCCCCACC | 2319 |
| | AUCUCCACU | |
| R5230_CasPhi12_S | AUUGCUCCUUACGAGGAGACCCAGAGCC | 2320 |
| | CAUGGGGCA | |
| R5231_CasPhi12_S | AUUGCUCCUUACGAGGAGACGCCAGAGC | 2321 |
| | CCAUGGGGC | |
| R5232_CasPhi12_S | AUUGCUCCUUACGAGGAGACCAGCCUCA | 2322 |
| | GAGAUUUGC | |
| R5233_CasPhi12_S | AUUGCUCCUUACGAGGAGACGGAGGCCG | 2323 |
| | UGGACAGUG | |
| R5234_CasPhi12_S | AUUGCUCCUUACGAGGAGACACUGUCCA | 2324 |
| | CGGCCUCCC | |
| R5235_CasPhi12_S | AUUGCUCCUUACGAGGAGACGCUCCAUC | 2325 |
| | AGCCACUGA | |
| R5236_CasPhi12_S | AUUGCUCCUUACGAGGAGACAGGCAUGC | 2326 |
| | UGGGCAGGU | |
| R5237_CasPhi12_S | AUUGCUCCUUACGAGGAGACCUCGGGAG | 2327 |
| | GUCAGGGCA | |
| R5238_CasPhi12_S | AUUGCUCCUUACGAGGAGACGCUCGGGA | 2328 |
| | GGUCAGGGC | |
| R5239_CasPhi12_S | AUUGCUCCUUACGAGGAGACGAGACCUC | 2329 |
| | UCCAGCUGC | |
| R5240_CasPhi12_S | AUUGCUCCUUACGAGGAGACUUGGAGAC | 2330 |
| | CUCUCCAGC | |
| R5241_CasPhi12_S | AUUGCUCCUUACGAGGAGACGAAGCUUG | 2331 |
| | UUGGAGACC | |
| R5242_CasPhi12_S | AUUGCUCCUUACGAGGAGACGGAAGCUU | 2332 |
| | GUUGGAGAC | |
| R5243_CasPhi12_S | AUUGCUCCUUACGAGGAGACUGGAAGCU | 2333 |
| | UGUUGGAGA | |
| R5244_CasPhi12_S | AUUGCUCCUUACGAGGAGACUACCGCUC | 2334 |
| | ACUGCAGGA | |
| R5245_CasPhi12_S | AUUGCUCCUUACGAGGAGACCUGCUGCU | 2335 |
| | CCUCUCCAG | |
| R5246_CasPhi12_S | AUUGCUCCUUACGAGGAGACCCGCUCCA | 2336 |
| | GGCUCUUGC | |
| R5247_CasPhi12_S | AUUGCUCCUUACGAGGAGACUGCCCAGU | 2337 |
| | CCGGGGUGG | |
| R5248_CasPhi12_S | AUUGCUCCUUACGAGGAGACGGCCAGCU | 2338 |
| | GCCGUUCUG | |
| R5249_CasPhi12_S | AUUGCUCCUUACGAGGAGACGCAGCCAA | 2339 |
| | CAGCACCUC | |
| R5250_CasPhi12_S | AUUGCUCCUUACGAGGAGACGCUGCCAA | 2340 |
| | GGAGCACCG | |
| R5251_CasPhi12_S | AUUGCUCCUUACGAGGAGACCCCAGCAC | 2341 |
| | AGCAAUCAC | |
| R5252_CasPhi12_S | AUUGCUCCUUACGAGGAGACGCCCAGCA | 2342 |
| | CAGCAAUCA | |
| R5253_CasPhi12_S | AUUGCUCCUUACGAGGAGACCUGUGCUG | 2343 |
| | GGCAAAGCU | |
| R5254_CasPhi12_S | AUUGCUCCUUACGAGGAGACCCCUGACC | 2344 |
| | AGCUUUGCC | |
| R5255_CasPhi12_S | AUUGCUCCUUACGAGGAGACGGCUGGGG | 2345 |
| | CAGUGAGCC | |
| R5256_CasPhi12_S | AUUGCUCCUUACGAGGAGACUGGCCGGC | 2346 |
| | UUCCCCAGU | |
| R5257_CasPhi12_S | AUUGCUCCUUACGAGGAGACCCCAGUAC | 2347 |
| | GACUUUGUC | |
| R5258_CasPhi12_S | AUUGCUCCUUACGAGGAGACGUCUUCUC | 2348 |
| | UGUCCCCUG | |
| R5259_CasPhi12_S | AUUGCUCCUUACGAGGAGACUCUUCUCU | 2349 |
| | GUCCCCUGC | |
| R5260_CasPhi12_S | AUUGCUCCUUACGAGGAGACUCUGUCCC | 2350 |
| | CUGCCAUUG | |
| R5261_CasPhi12_S | AUUGCUCCUUACGAGGAGACAAGCAAUG | 2351 |
| | GCAGGGGAC | |
| R5262_CasPhi12_S | AUUGCUCCUUACGAGGAGACCUUGAACC | 2352 |
| | GUCCGGGGG | |
| R5263_CasPhi12_S | AUUGCUCCUUACGAGGAGACAACCGUCC | 2353 |
| | GGGGGAUGC | |
| R5264_CasPhi12_S | AUUGCUCCUUACGAGGAGACUCCCUGGG | 2354 |
| | CCCACAGCC | |
| R5265_CasPhi12_S | AUUGCUCCUUACGAGGAGACAAGAUGUG | 2355 |
| | GCUGAAAAC | |
| R5266_CasPhi12_S | AUUGCUCCUUACGAGGAGACUCAGCCAC | 2356 |
| | AUCUUGAAG | |
| R5267_CasPhi12_S | AUUGCUCCUUACGAGGAGACCAGCCACA | 2357 |
| | UCUUGAAGA | |
| R5268_CasPhi12_S | AUUGCUCCUUACGAGGAGACAGCCACAU | 2358 |
| | CUUGAAGAG | |
| R5269_CasPhi12_S | AUUGCUCCUUACGAGGAGACAAGAGACC | 2359 |
| | UGACCGCGU | |
| R5270_CasPhi12_S | AUUGCUCCUUACGAGGAGACUGCUCAUC | 2360 |
| | CUAGACGGC | |
| R5271_CasPhi12_S | AUUGCUCCUUACGAGGAGACCAGCUCCU | 2361 |
| | CGAAGCCGU | |
| R5272_CasPhi12_S | AUUGCUCCUUACGAGGAGACCGCUUCCA | 2362 |
| | GCUCCUCGA | |
| R5273_CasPhi12_S | AUUGCUCCUUACGAGGAGACGAGGAGCU | 2363 |
| | GGAAGCGCA | |
| R5274_CasPhi12_S | AUUGCUCCUUACGAGGAGACCUGCACAG | 2364 |
| | CACGUGCGG | |
| R5275_CasPhi12_S | AUUGCUCCUUACGAGGAGACUGGAAAAG | 2365 |
| | GCCGGCCAG | |
| R5276_CasPhi12_S | AUUGCUCCUUACGAGGAGACUUCUGGAA | 2366 |
| | AAGGCCGGC | |
| R5277_CasPhi12_S | AUUGCUCCUUACGAGGAGACUCCAGAAG | 2367 |
| | AAGCUGCUC | |
| R5278_CasPhi12_S | AUUGCUCCUUACGAGGAGACCCAGAAGA | 2368 |
| | AGCUGCUCC | |
| R5279_CasPhi12_S | AUUGCUCCUUACGAGGAGACCAGAAGAA | 2369 |
| | GCUGCUCCG | |
| R5280_CasPhi12_S | AUUGCUCCUUACGAGGAGACCACCCUCC | 2370 |
| | UCCUCACAG | |
| R5281_CasPhi12_S | AUUGCUCCUUACGAGGAGACCUCAGGCU | 2371 |
| | CUGGACCAG | |
| R5282_CasPhi12_S | AUUGCUCCUUACGAGGAGACGAGCUGUC | 2372 |
| | CGGCUUCUC | |
| R5283_CasPhi12_S | AUUGCUCCUUACGAGGAGACAGCUGUCC | 2373 |
| | GGCUUCUCC | |
| R5284_CasPhi12_S | AUUGCUCCUUACGAGGAGACUCCAUGGA | 2374 |
| | GCAGGCCCA | |
| R5285_CasPhi12_S | AUUGCUCCUUACGAGGAGACGAGAGCUC | 2375 |
| | AGGGAUGAC | |
| R5286_CasPhi12_S | AUUGCUCCUUACGAGGAGACAGAGCUCA | 2376 |
| | GGGAUGACA | |
| R5287_CasPhi12_S | AUUGCUCCUUACGAGGAGACGUGCUCUG | 2377 |
| | UCAUCCCUG | |
| R5288_CasPhi12_S | AUUGCUCCUUACGAGGAGACUUCUCAGU | 2378 |
| | CACAGCCAC | |
| R5289_CasPhi12_S | AUUGCUCCUUACGAGGAGACUCAGUCAC | 2379 |
| | AGCCACAGC | |
| R5290_CasPhi12_S | AUUGCUCCUUACGAGGAGACGUGCCGGG | 2380 |
| | CAGUGUGCC | |
| R5291_CasPhi12_S | AUUGCUCCUUACGAGGAGACUGCCGGGC | 2381 |
| | AGUGUGCCA | |
| R5292_CasPhi12_S | AUUGCUCCUUACGAGGAGACGCGUCCUC | 2382 |
| | CCCAAGCUC | |
| R5293_CasPhi12_S | AUUGCUCCUUACGAGGAGACGGGAGGAC | 2383 |
| | GCCAAGCUG | |
| R5294_CasPhi12_S | AUUGCUCCUUACGAGGAGACGCCAGCUC | 2384 |
| | UGCCAGGGC | |
| R5295_CasPhi12_S | AUUGCUCCUUACGAGGAGACAUGUCUGC | 2385 |
| | GGCCCAGCU | |
| R5392_CasPhi12_S | AUUGCUCCUUACGAGGAGACGAUGUCUG | 2386 |
| | CGGCCCAGC | |
| R5393_CasPhi12_S | AUUGCUCCUUACGAGGAGACCCAUCCGC | 2387 |
| | AGACGUGAG | |
| R5394_CasPhi12_S | AUUGCUCCUUACGAGGAGACGCCAUCGC | 2388 |
| | CCAGGUCCU | |
| R5395_CasPhi12_S | AUUGCUCCUUACGAGGAGACGGCCAUCG | 2389 |
| | CCCAGGUCC | |
| R5396_CasPhi12_S | AUUGCUCCUUACGAGGAGACGACUAAGC | 2390 |
| | CUUUGGCCA | |
| R5397_CasPhi12_S | AUUGCUCCUUACGAGGAGACGUCCAACA | 2391 |
| | CCCACCGCG | |
| R5398_CasPhi12_S | AUUGCUCCUUACGAGGAGACCAGGAGGA | 2392 |
| | AGCUGGGGA | |
| R5399_CasPhi12_S | AUUGCUCCUUACGAGGAGACCCCAGCUU | 2393 |
| | CCUCCUGCA | |
| R5400_CasPhi12_S | AUUGCUCCUUACGAGGAGACCUCCUGCA | 2394 |
| | AUGCUUCCU | |
| R5401_CasPhi12_S | AUUGCUCCUUACGAGGAGACCUGGGGGC | 2395 |
| | CCUGUGGCU | |
| R5402_CasPhi12_S | AUUGCUCCUUACGAGGAGACGCCACUCA | 2396 |
| | GAGCCAGCC | |
| R5403_CasPhi12_S | AUUGCUCCUUACGAGGAGACCGCCACUC | 2397 |
| | AGAGCCAGC | |
| R5404_CasPhi12_S | AUUGCUCCUUACGAGGAGACAUUUCGCC | 2398 |
| | ACUCAGAGC | |
| R5405_CasPhi12_S | AUUGCUCCUUACGAGGAGACUCCUUGAU | 2399 |
| | UUCGCCACU | |
| R5406_CasPhi12_S | AUUGCUCCUUACGAGGAGACGGGUCAAU | 2400 |
| | GCUAGGUAC | |
| R5407_CasPhi12_S | AUUGCUCCUUACGAGGAGACCUUGGGGU | 2401 |
| | CAAUGCUAG | |
| R5408_CasPhi12_S | AUUGCUCCUUACGAGGAGACUUCCUUGG | 2402 |
| | GGUCAAUGC | |
| R5409_CasPhi12_S | AUUGCUCCUUACGAGGAGACACCCCAAG | 2403 |
| | GAAGAAGAG | |
| R5410_CasPhi12_S | AUUGCUCCUUACGAGGAGACUCAUAGGG | 2404 |
| | CCUCUUCUU | |
| R5411_CasPhi12_S | AUUGCUCCUUACGAGGAGACCUGGCUGG | 2405 |
| | GCUGAUCUU | |
| R5412_CasPhi12_S | AUUGCUCCUUACGAGGAGACUGGCUGGG | 2406 |
| | CUGAUCUUC | |
| R5413_CasPhi12_S | AUUGCUCCUUACGAGGAGACCAGCCUCC | 2407 |
| | CGCCCGCUG | |
| R5414_CasPhi12_S | AUUGCUCCUUACGAGGAGACCUGUCCAC | 2408 |
| | CGAGGCAGC | |
| R5415_CasPhi12_S | AUUGCUCCUUACGAGGAGACUGCUUCCU | 2409 |
| | GUCCACCGA | |
| R5416_CasPhi12_S | AUUGCUCCUUACGAGGAGACAGGUACCU | 2410 |
| | CGCAAGCAC | |
| R5417_CasPhi12_S | AUUGCUCCUUACGAGGAGACCGAGGUAC | 2411 |
| | CUGAAGCGG | |
| R5418_CasPhi12_S | AUUGCUCCUUACGAGGAGACCAGCCUCC | 2412 |
| | UCGGCCUCG | |
| R5419_CasPhi12_S | AUUGCUCCUUACGAGGAGACGGCAGCAC | 2413 |
| | GUGGUACAG | |
| R5420_CasPhi12_S | AUUGCUCCUUACGAGGAGACGCAGCACG | 2414 |
| | UGGUACAGG | |
| R5421_CasPhi12_S | AUUGCUCCUUACGAGGAGACUCUGGGCA | 2415 |
| | CCCGCCUCA | |
| R5422_CasPhi12_S | AUUGCUCCUUACGAGGAGACCUGGGCAC | 2416 |
| | CCGCCUCAC | |
| R5423_CasPhi12_S | AUUGCUCCUUACGAGGAGACUGGGCACC | 2417 |
| | CGCCUCACG | |
| R5424_CasPhi12_S | AUUGCUCCUUACGAGGAGACCCCAGUAC | 2418 |
| | AUGUGCAUC | |
| R5425_CasPhi12_S | AUUGCUCCUUACGAGGAGACGCCCGCCG | 2419 |
| | CCUCCAAGG | |
| R5426_CasPhi12_S | AUUGCUCCUUACGAGGAGACGAGGCGGC | 2420 |
| | GGGCCAAGA | |
| R5427_CasPhi12_S | AUUGCUCCUUACGAGGAGACUCCCUGGA | 2421 |
| | CCUCCGCAG | |
| R5428_CasPhi12_S | AUUGCUCCUUACGAGGAGACGCCCCUCU | 2422 |
| | GGAUUGGGG | |
| R5429_CasPhi12_S | AUUGCUCCUUACGAGGAGACCCCCUCUG | 2423 |
| | GAUUGGGGA | |
| R5430_CasPhi12_S | AUUGCUCCUUACGAGGAGACGGGAGCCU | 2424 |
| | CGUGGGACU | |
| R5431_CasPhi12_S | AUUGCUCCUUACGAGGAGACGUCUCCCC | 2425 |
| | AUGCUGCUG | |
| R5432_CasPhi12_S | AUUGCUCCUUACGAGGAGACUCCUCUGC | 2426 |
| | UGCCUGAAG | |
| R5433_CasPhi12_S | AUUGCUCCUUACGAGGAGACAGGCAGCA | 2427 |
| | GAGGAGAAG | |
| R5434_CasPhi12_S | AUUGCUCCUUACGAGGAGACAAAGGCUC | 2428 |
| | GAUGGUGAA | |
| R5435_CasPhi12_S | AUUGCUCCUUACGAGGAGACGAAAGGCU | 2429 |
| | CGAUGGUGA | |
| R5436_CasPhi12_S | AUUGCUCCUUACGAGGAGACACCAUCGA | 2430 |
| | GCCUUUCAA | |
| R5437_CasPhi12_S | AUUGCUCCUUACGAGGAGACGCUUUGAA | 2431 |
| | AGGCUCGAU | |
| R5438_CasPhi12_S | AUUGCUCCUUACGAGGAGACAGGGACUU | 2432 |
| | GGCUUUGAA | |
| R5439_CasPhi12_S | AUUGCUCCUUACGAGGAGACCAAAGCCA | 2433 |
| | AGUCCCUGA | |
| R5440_CasPhi12_S | AUUGCUCCUUACGAGGAGACAAAGCCAA | 2434 |
| | GUCCCUGAA | |
| R5441_CasPhi12_S | AUUGCUCCUUACGAGGAGACCACAUCCU | 2435 |
| | UCAGGGACU | |
| R5442_CasPhi12_S | AUUGCUCCUUACGAGGAGACCCAGGUCU | 2436 |
| | UCCACAUCC | |
| R5443_CasPhi12_S | AUUGCUCCUUACGAGGAGACCCCAGGUC | 2437 |
| | UUCCACAUC | |
| R5444_CasPhi12_S | AUUGCUCCUUACGAGGAGACCUCGGAAG | 2438 |
| | ACACAGCUG | |
| R5445_CasPhi12_S | AUUGCUCCUUACGAGGAGACGGUCCCGA | 2439 |
| | ACAGCAGGG | |
| R5446_CasPhi12_S | AUUGCUCCUUACGAGGAGACAGGUCCCG | 2440 |
| | AACAGCAGG | |
| R5447_CasPhi12_S | AUUGCUCCUUACGAGGAGACUUUAGGUC | 2441 |
| | CCGAACAGC | |
| R5448_CasPhi12_S | AUUGCUCCUUACGAGGAGACCUUUAGGU | 2442 |
| | CCCGAACAG | |
| R5449_CasPhi12_S | AUUGCUCCUUACGAGGAGACGGGACCUA | 2443 |
| | AAGAAACUG | |
| R5450_CasPhi12_S | AUUGCUCCUUACGAGGAGACGGGAAAGC | 2444 |
| | CUGGGGGCC | |
| R5451_CasPhi12_S | AUUGCUCCUUACGAGGAGACGGGGAAAG | 2445 |
| | CCUGGGGGC | |
| R5452_CasPhi12_S | AUUGCUCCUUACGAGGAGACCCCCAAAC | 2446 |
| | UGGUGCGGA | |
| R5453_CasPhi12_S | AUUGCUCCUUACGAGGAGACCCCAAACU | 2447 |
| | GGUGCGGAU | |
| R5454_CasPhi12_S | AUUGCUCCUUACGAGGAGACUUCUCACU | 2448 |
| | CAGCGCAUC | |
| R5455_CasPhi12_S | AUUGCUCCUUACGAGGAGACAGCUGGGG | 2449 |
| | GAAGGUGGC | |
| R5456_CasPhi12_S | AUUGCUCCUUACGAGGAGACCCCCAGCU | 2450 |
| | GAAGUCCUU | |
| R5457_CasPhi12_S | AUUGCUCCUUACGAGGAGACCAAGGACU | 2451 |
| | UCAGCUGGG | |
| R5458_CasPhi12_S | AUUGCUCCUUACGAGGAGACCCAAGGAC | 2452 |
| | UUCAGCUGG | |
| R5459_CasPhi12_S | AUUGCUCCUUACGAGGAGACAGGGUUUC | 2453 |
| | CAAGGACUU | |
| R5460_CasPhi12_S | AUUGCUCCUUACGAGGAGACUAGGCACC | 2454 |
| | CAGGUCAGU | |
| R5461_CasPhi12_S | AUUGCUCCUUACGAGGAGACGUAGGCAC | 2455 |
| | CCAGGUCAG | |
| R5462_CasPhi12_S | AUUGCUCCUUACGAGGAGACGCUCGCUG | 2456 |
| | CAUCCCUGC | |
| R5463_CasPhi12_S | AUUGCUCCUUACGAGGAGACGCCUGAGC | 2457 |
| | AGGGAUGCA | |
| R5464_CasPhi12_S | AUUGCUCCUUACGAGGAGACUACAAUAA | 2458 |
| | CUGCAUCUG | |
| R5465_CasPhi12_S | AUUGCUCCUUACGAGGAGACGCUCGUGU | 2459 |
| | GCUUCCGGA | |
| R5466_CasPhi12_S | AUUGCUCCUUACGAGGAGACCGGACAUG | 2460 |
| | GUGUCCCUC | |
| R5467_CasPhi12_S | AUUGCUCCUUACGAGGAGACACGGCUGC | 2461 |
| | CGGGGCCCA | |
| R5468_CasPhi12_S | AUUGCUCCUUACGAGGAGACGGAGGUGU | 2462 |
| | CCUCAUGUG | |
| R5469_CasPhi12_S | AUUGCUCCUUACGAGGAGACCUGGACAC | 2463 |
| | UGAAUGGGA | |
| R5470_CasPhi12_S | AUUGCUCCUUACGAGGAGACAGUGUCCA | 2464 |
| | GGAACACCU | |
| R5471_CasPhi12_S | AUUGCUCCUUACGAGGAGACCAGGUGUU | 2465 |
| | CCUGGACAC | |
| R5472_CasPhi12_S | AUUGCUCCUUACGAGGAGACUUGCAGGU | 2466 |
| | GUUCCUGGA | |
| R5473_CasPhi12_S | AUUGCUCCUUACGAGGAGACACGGAUCA | 2467 |
| | GCCUGAGAU | |

TABLE AC
CasΦ.12 gRNAs targeting mouse PCSK9

| | | SEQ ID |
|---|---|---|
| Name | Repeat + spacer RNA Sequence (5′ → 3′) | NO |
| R4238_CasPhi12_S | AUUGCUCCUUACGAGGAGACCCGCUGUUGCCG | 1734 |
| | CCGCU | |
| R4239_CasPhi12_S | AUUGCUCCUUACGAGGAGACCCGCCGCUGCUG | 1735 |
| | CUGCU | |
| R4240_CasPhi12_S | AUUGCUCCUUACGAGGAGACCUGCUACUGUGC | 1736 |
| | CCCAC | |
| R4241_CasPhi12_S | AUUGCUCCUUACGAGGAGACAUAAUCUCCAUC | 1737 |
| | CUCGU | |
| R4242_CasPhi12_S | AUUGCUCCUUACGAGGAGACUGAAGAGCUGAU | 1738 |
| | GCUCG | |
| R4243_CasPhi12_S | AUUGCUCCUUACGAGGAGACGAGCAACGGCGG | 1739 |
| | AAGGU | |
| R4244_CasPhi12_S | AUUGCUCCUUACGAGGAGACCUGGCAGCCUCC | 1740 |
| | AGGCC | |
| R4245_CasPhi12_S | AUUGCUCCUUACGAGGAGACUGGUGCUGAUGG | 1741 |
| | AGGAG | |
| R4246_CasPhi12_S | AUUGCUCCUUACGAGGAGACAAUCUGUAGCCU | 1742 |
| | CUGGG | |
| R4247_CasPhi12_S | AUUGCUCCUUACGAGGAGACUUCAAUCUGUAG | 1743 |
| | CCUCU | |
| R4248_CasPhi12_S | AUUGCUCCUUACGAGGAGACGUUCAAUCUGUA | 1744 |
| | GCCUC | |
| R4249_CasPhi12_S | AUUGCUCCUUACGAGGAGACAACAAACUGCCC | 1745 |
| | ACCGC | |
| R4250_CasPhi12_S | AUUGCUCCUUACGAGGAGACAUGACAUAGCCC | 1746 |
| | CGGCG | |
| R4251_CasPhi12_S | AUUGCUCCUUACGAGGAGACUACAUAUCUUUU | 1747 |
| | AUGAC | |
| R4252_CasPhi12_S | AUUGCUCCUUACGAGGAGACUAUGACCUCUUC | 1748 |
| | CCUGG | |
| R4253_CasPhi12_S | AUUGCUCCUUACGAGGAGACAUGACCUCUUCC | 1749 |
| | CUGGC | |
| R4254_CasPhi12_S | AUUGCUCCUUACGAGGAGACUGACCUCUUCCC | 1750 |
| | UGGCU | |
| R4255_CasPhi12_S | AUUGCUCCUUACGAGGAGACACCAAGAAGCCA | 1751 |
| | GGGAA | |
| R4256_CasPhi12_S | AUUGCUCCUUACGAGGAGACCCUGGCUUCUUG | 1752 |
| | GUGAA | |
| R4257_CasPhi12_S | AUUGCUCCUUACGAGGAGACUUGGUGAAGAUG | 1753 |
| | AGCAG | |
| R4258_CasPhi12_S | AUUGCUCCUUACGAGGAGACGUGAAGAUGAGC | 1754 |
| | AGUGA | |
| R4259_CasPhi12_S | AUUGCUCCUUACGAGGAGACCCCCAUGUGGAG | 1755 |
| | UACAU | |
| R4260_CasPhi12_S | AUUGCUCCUUACGAGGAGACCUCAAUGUACUC | 1756 |
| | CACAU | |
| R4261_CasPhi12_S | AUUGCUCCUUACGAGGAGACAGGAAGACUCCU | 1757 |
| | UUGUC | |
| R4262_CasPhi12_S | AUUGCUCCUUACGAGGAGACGUCUUCGCCCAG | 1758 |
| | AGCAU | |
| R4263_CasPhi12_S | AUUGCUCCUUACGAGGAGACUCUUCGCCCAGA | 1759 |
| | GCAUC | |
| R4264_CasPhi12_S | AUUGCUCCUUACGAGGAGACGCCCAGAGCAUC | 1760 |
| | CCAUG | |
| R4265_CasPhi12_S | AUUGCUCCUUACGAGGAGACCAUGGGAUGCUC | 1761 |
| | UGGGC | |
| R4266_CasPhi12_S | AUUGCUCCUUACGAGGAGACGCUCCAGGUUCC | 1762 |
| | AUGGG | |
| R4267_CasPhi12_S | AUUGCUCCUUACGAGGAGACUCCCAGCAUGGC | 1763 |
| | ACCAG | |
| R4268_CasPhi12_S | AUUGCUCCUUACGAGGAGACCUCUGUCUGGUG | 1764 |
| | CCAUG | |
| R4269_CasPhi12_S | AUUGCUCCUUACGAGGAGACGAUACCAGCAUC | 1765 |
| | CAGGG | |
| R4270_CasPhi12_S | AUUGCUCCUUACGAGGAGACAGGGCAGGGUCA | 1766 |
| | CCAUC | |
| R4271_CasPhi12_S | AUUGCUCCUUACGAGGAGACAAGUCGGUGAUG | 1767 |
| | GUGAC | |
| R4272_CasPhi12_S | AUUGCUCCUUACGAGGAGACAACAGCGUGCCG | 1768 |
| | GAGGA | |
| R4273_CasPhi12_S | AUUGCUCCUUACGAGGAGACGCCACACCAGCA | 1769 |
| | UCCCG | |
| R4274_CasPhi12_S | AUUGCUCCUUACGAGGAGACAGCACACGCAGG | 1770 |
| | CUGUG | |
| R4275_CasPhi12_S | AUUGCUCCUUACGAGGAGACACAGUUGAGCAC | 1771 |
| | ACGCA | |
| R4276_CasPhi12_S | AUUGCUCCUUACGAGGAGACCCUUGACAGUUG | 1772 |
| | AGCAC | |
| R4277_CasPhi12_S | AUUGCUCCUUACGAGGAGACGCUGACUCUUCC | 1773 |
| | GAAUA | |
| R4278_CasPhi12_S | AUUGCUCCUUACGAGGAGACAUUCGGAAGAGU | 1774 |
| | CAGCU | |
| R4279_CasPhi12_S | AUUGCUCCUUACGAGGAGACUUCGGAAGAGUC | 1775 |
| | AGCUA | |
| R4280_CasPhi12_S | AUUGCUCCUUACGAGGAGACGGAAGAGUCAGC | 1776 |
| | UAAUC | |
| R4281_CasPhi12_S | AUUGCUCCUUACGAGGAGACUGCUGCCCCUGG | 1777 |
| | CCGGU | |
| R4282_CasPhi12_S | AUUGCUCCUUACGAGGAGACAGGAUGCGGCUA | 1778 |
| | UACCC | |
| R4283_CasPhi12_S | AUUGCUCCUUACGAGGAGACCCAGCUGCUGCA | 1779 |
| | ACCAG | |
| R4284_CasPhi12_S | AUUGCUCCUUACGAGGAGACCAGCAGCUGGGA | 1780 |
| | ACUUC | |
| R4285_CasPhi12_S | AUUGCUCCUUACGAGGAGACCGGGACGACGCC | 1781 |
| | UGCCU | |
| R4286_CasPhi12_S | AUUGCUCCUUACGAGGAGACGUGGCCCCGACU | 1782 |
| | GUGAU | |
| R4287_CasPhi12_S | AUUGCUCCUUACGAGGAGACCCUUGGGGACUU | 1783 |
| | UGGGG | |
| R4288_CasPhi12_S | AUUGCUCCUUACGAGGAGACGUCCCCAAAGUC | 1784 |
| | CCCAA | |
| R4289_CasPhi12_S | AUUGCUCCUUACGAGGAGACGGGACUUUGGGG | 1785 |
| | ACUAA | |
| R4290_CasPhi12_S | AUUGCUCCUUACGAGGAGACGGGGACUAAUUU | 1786 |
| | UGGAC | |
| R4291_CasPhi12_S | AUUGCUCCUUACGAGGAGACGGGACUAAUUUU | 1787 |
| | GGACG | |
| R4292_CasPhi12_S | AUUGCUCCUUACGAGGAGACUGGACGCUGUGU | 1788 |
| | GGAUC | |
| R4293_CasPhi12_S | AUUGCUCCUUACGAGGAGACGGACGCUGUGUG | 1789 |
| | GAUCU | |
| R4294_CasPhi12_S | AUUGCUCCUUACGAGGAGACGACGCUGUGUGG | 1790 |
| | AUCUC | |
| R4295_CasPhi12_S | AUUGCUCCUUACGAGGAGACCCGGGGGCAAAG | 1791 |
| | AGAUC | |
| R4296_CasPhi12_S | AUUGCUCCUUACGAGGAGACGCCCCCGGGAAG | 1792 |
| | GACAU | |
| R4297_CasPhi12_S | AUUGCUCCUUACGAGGAGACCCCCCGGGAAGG | 1793 |
| | ACAUC | |
| R4298_CasPhi12_S | AUUGCUCCUUACGAGGAGACAUGUCACAGAGU | 1794 |
| | GGGAC | |
| R4299_CasPhi12_S | AUUGCUCCUUACGAGGAGACUGGCUCGGAUGC | 1795 |
| | UGAGC | |
| R4300_CasPhi12_S | AUUGCUCCUUACGAGGAGACCCCUGGCCGAGC | 1796 |
| | UGCGG | |
| R4301_CasPhi12_S | AUUGCUCCUUACGAGGAGACGUAGAGAAGUGG | 1797 |
| | AUCAG | |
| R4302_CasPhi12_S | AUUGCUCCUUACGAGGAGACGGUAGAGAAGUG | 1798 |
| | GAUCA | |
| R4303_CasPhi12_S | AUUGCUCCUUACGAGGAGACUCUACCAAAGAC | 1799 |
| | GUCAU | |
| R4304_CasPhi12_S | AUUGCUCCUUACGAGGAGACAUGACGUCUUUG | 1800 |
| | GUAGA | |
| R4305_CasPhi12_S | AUUGCUCCUUACGAGGAGACCCUGAGGACCAG | 1801 |
| | CAGGU | |
| R4306_CasPhi12_S | AUUGCUCCUUACGAGGAGACGGGGUCAGCACC | 1802 |
| | UGCUG | |
| R4307_CasPhi12_S | AUUGCUCCUUACGAGGAGACGAGUGGGCCCCG | 1803 |
| | AGUGU | |
| R4308_CasPhi12_S | AUUGCUCCUUACGAGGAGACUGGGGCACAGCG | 1804 |
| | GGCUG | |
| R4309_CasPhi12_S | AUUGCUCCUUACGAGGAGACUCCAGGAGCGGG | 1805 |
| | AGGCG | |
| R4310_CasPhi12_S | AUUGCUCCUUACGAGGAGACCAGACCUGCUGG | 1806 |
| | CCUCC | |
| R4311_CasPhi12_S | AUUGCUCCUUACGAGGAGACAGGGCCUUGCAG | 1807 |
| | ACCUG | |
| R4312_CasPhi12_S | AUUGCUCCUUACGAGGAGACGGGGGUGAGGGU | 1808 |
| | GUCUA | |
| R4313_CasPhi12_S | AUUGCUCCUUACGAGGAGACGGGGUGAGGGUG | 1809 |
| | UCUAU | |
| R4314_CasPhi12_S | AUUGCUCCUUACGAGGAGACGCACGGGGAACC | 1810 |
| | AGGCA | |
| R4315_CasPhi12_S | AUUGCUCCUUACGAGGAGACCCCGUGCCAACU | 1811 |
| | GCAGC | |
| R4316_CasPhi12_S | AUUGCUCCUUACGAGGAGACUGGAUGCUGCAG | 1812 |
| | UUGGC | |
| R4317_CasPhi12_S | AUUGCUCCUUACGAGGAGACUGGUGGCAGUGG | 1813 |
| | ACAUG | |
| R4318_CasPhi12_S | AUUGCUCCUUACGAGGAGACCACUUCCCAAUG | 1814 |
| | GAAGC | |
| R4319_CasPhi12_S | AUUGCUCCUUACGAGGAGACCAUUGGGAAGUG | 1815 |
| | GAAGA | |
| R4320_CasPhi12_S | AUUGCUCCUUACGAGGAGACGGAAGUGGAAGA | 1816 |
| | CCUUA | |
| R4321_CasPhi12_S | AUUGCUCCUUACGAGGAGACGUGUCCGGAGGC | 1817 |
| | AGCCU | |
| R4322_CasPhi12_S | AUUGCUCCUUACGAGGAGACGCCACCAGGCGG | 1818 |
| | CCAGU | |
| R4323_CasPhi12_S | AUUGCUCCUUACGAGGAGACCUGCUGCCAUGC | 1819 |
| | CCCAG | |
| R4324_CasPhi12_S | AUUGCUCCUUACGAGGAGACCAGCCCUGGGGC | 1820 |
| | AUGGC | |
| R4325_CasPhi12_S | AUUGCUCCUUACGAGGAGACCAUUCCAGCCCU | 1821 |
| | GGGGC | |
| R4326_CasPhi12_S | AUUGCUCCUUACGAGGAGACGCAUUCCAGCCC | 1822 |
| | UGGGG | |
| R4327_CasPhi12_S | AUUGCUCCUUACGAGGAGACUGCAUUCCAGCC | 1823 |
| | CUGGG | |
| R4328_CasPhi12_S | AUUGCUCCUUACGAGGAGACAUUUUGCAUUCC | 1824 |
| | AGCCC | |
| R4329_CasPhi12_S | AUUGCUCCUUACGAGGAGACCAUCCAGUCAGG | 1825 |
| | GUCCA | |
| R4330_CasPhi12_S | AUUGCUCCUUACGAGGAGACUCCACGCUGUAG | 1826 |
| | GCUCC | |
| R4331_CasPhi12_S | AUUGCUCCUUACGAGGAGACCCACACACAGGU | 1827 |
| | UGUCC | |
| R4332_CasPhi12_S | AUUGCUCCUUACGAGGAGACUCCACUGGUCCU | 1828 |
| | GUCUG | |
| R4333_CasPhi12_S | AUUGCUCCUUACGAGGAGACCUGAAGGCCGGC | 1829 |
| | UCCGG | |

TABLE AD
CasΦ.12 gRNAs targeting Bak1 in CHO cells

| | Repeat + spacer RNA Sequence (5′ → 3′), | SEQ ID |
|---|---|---|
| Name | shown as DNA | NO |
| R2452 | ATTGCTCCTTACGAGGAGACGAAGCTATGTT | 1830 |
| Bak1_CasPhi12_1_S | TTCCAT | |
| R2453 | ATTGCTCCTTACGAGGAGACGCAGGGGCAGC | 1831 |
| Bak1_CasPhi12_2_S | CGCCCC | |
| R2454 | ATTGCTCCTTACGAGGAGACCTCCTAGAACC | 1832 |
| Bak1_CasPhi12_3_S | CAACAG | |
| R2455 | ATTGCTCCTTACGAGGAGACGAAAGACCTCC | 1833 |
| Bak1_CasPhi12_4_S | TCTGTG | |
| R2456 | ATTGCTCCTTACGAGGAGACTCCATCTCGGG | 1834 |
| Bak1_CasPhi12_5_S | GTTGGC | |
| R2457 | ATTGCTCCTTACGAGGAGACTTCCTGATGGT | 1835 |
| Bak1_CasPhi12_6_S | GGAGAT | |
| R2849_Bak1_CasPhi12_ | ATTGCTCCTTACGAGGAGACCTGACTCCCAG | 1836 |
| nsd_sg1_S | CTCTGA | |
| R2850_Bak1_ | ATTGCTCCTTACGAGGAGACTGGGGTCAGAG | 1837 |
| CasPhi12_nsd_sg2_S | CTGGGA | |
| R2851_Bak1_CasPhi12_ | ATTGCTCCTTACGAGGAGACGAAAGACCTCC | 1838 |
| nsd_sg3_S | TCTGTG | |
| R2852_Bak1_ | ATTGCTCCTTACGAGGAGACCGAAGCTATGT | 1839 |
| CasPhi12_nsd_sg4_S | TTTCCA | |
| R2853_Bak1_ | ATTGCTCCTTACGAGGAGACGAAGCTATGTT | 1840 |
| CasPhi12_nsd_sg5_S | TTCCAT | |
| R2854_Bak1_ | ATTGCTCCTTACGAGGAGACTCCATCTCCACC | 1841 |
| CasPhi12_nsd_sg6_S | ATCAG | |
| R2855_Bak1_ | ATTGCTCCTTACGAGGAGACCCATCTCCACC | 1842 |
| CasPhi12_nsd_sg7_S | ATCAGG | |
| R2856_Bak1_ | ATTGCTCCTTACGAGGAGACCTGATGGTGGA | 1843 |
| CasPhi12_nsd_sg8_S | GATGGA | |
| R2857_Bak1_ | ATTGCTCCTTACGAGGAGACCATCTCCACCA | 1844 |
| CasPhi12_nsd_sg9_S | TCAGGA | |
| R2858_Bak1_ | ATTGCTCCTTACGAGGAGACTTCCTGATGGT | 1845 |
| CasPhi12_nsd_sg10_S | GGAGAT | |
| R2859_Bak1_ | ATTGCTCCTTACGAGGAGACGCAGGGGCAGC | 1846 |
| CasPhi12_nsd_sg11_S | CGCCCC | |
| R2860_Bak1_ | ATTGCTCCTTACGAGGAGACTCCATCTCGGG | 1847 |
| CasPhi12_nsd_sg12_S | GTTGGC | |
| R2861_Bak1_ | ATTGCTCCTTACGAGGAGACTAGGAGCAAAT | 1848 |
| CasPhi12_nsd_sg13_S | TGTCCA | |
| R2862_Bak1_ | ATTGCTCCTTACGAGGAGACGGTTCTAGGAG | 1849 |
| CasPhi12_nsd_sg14_S | CAAATT | |
| R2863_Bak1_ | ATTGCTCCTTACGAGGAGACGCTCCTAGAAC | 1850 |
| CasPhi12_nsd_sg15_S | CCAACA | |
| R2864_Bak1_ | ATTGCTCCTTACGAGGAGACCTCCTAGAACC | 1851 |
| CasPhi12_nsd_sg16_S | CAACAG | |
| R3977_Bak1_ | ATTGCTCCTTACGAGGAGACTCCAGACGCCA | 1852 |
| CasPhi12_exon1_sg1_ | TCTTTC | |
| S | | |
| R3978_Bak1_ | ATTGCTCCTTACGAGGAGACTGGTAAGAGTC | 1853 |
| CasPhi12_exon1_sg2_ | CTCCTG | |
| S | | |
| R3979_Bak1_ | ATTGCTCCTTACGAGGAGACTTACAGCATCTT | 1854 |
| CasPhi12_exon3_sg1_ | GGGTC | |
| S | | |
| R3980_Bak1_ | ATTGCTCCTTACGAGGAGACGGTCAGGTGGG | 1855 |
| CasPhi12_exon3_sg2_ | CCGGCA | |
| S | | |
| R3981_Bak1_ | ATTGCTCCTTACGAGGAGACCTATCATTGGA | 1856 |
| CasPhi12_exon3_sg3_ | GATGAC | |
| S | | |
| R3982_Bak1_ | ATTGCTCCTTACGAGGAGACGAGATGACATT | 1857 |
| CasPhi12_exon3_sg4_ | AACCGG | |
| S | | |
| R3983_Bak1_ | ATTGCTCCTTACGAGGAGACTGGAACTCTGT | 1858 |
| CasPhi12_exon3 sg5_ | GTCGTA | |
| S | | |
| R3984_Bak1_ | ATTGCTCCTTACGAGGAGACCAGAATTTACT | 1859 |
| CasPhi12_exon3_sg6_ | GGAGCA | |
| S | | |
| R3985_Bak1_ | ATTGCTCCTTACGAGGAGACACTGGAGCAGC | 1860 |
| CasPhi12_exon3_sg7_ | TGCAGC | |
| S | | |
| R3986_Bak1_ | ATTGCTCCTTACGAGGAGACCCAGCTGTGGG | 1861 |
| CasPhi12_exon3_sg8_ | CTGCAG | |
| S | | |
| R3987_Bak1_ | ATTGCTCCTTACGAGGAGACGTAGGCATTCC | 1862 |
| CasPhi12_exon3_sg9_ | CAGCTG | |
| S | | |
| R3988_Bak1_ | ATTGCTCCTTACGAGGAGACGTGAAGAGTTC | 1863 |
| CasPhi12_exon3_sg10_ | GTAGGC | |
| S | | |
| R3989_Bak1_ | ATTGCTCCTTACGAGGAGACACCAAGATTGC | 1864 |
| CasPhi12_exon3_sg11_ | CTCCAG | |
| S | | |
| R3990_Bak1_ | ATTGCTCCTTACGAGGAGACCCTCCAGGTAC | 1865 |
| CasPhi12_exon3_sg12_ | CCACCA | |
| S | | |

TABLE AE
CasΦ.12 gRNAs targeting Bax in CHO cells

| | Repeat + spacer RNA Sequence (5′ → 3′), | SEQ ID |
|---|---|---|
| Name | shown as DNA) | NO |
| R2458 | ATTGCTCCTTACGAGGAGACCTAATGTGGAT | 1866 |
| Bax_CasPhi12_1_S | ACTAAC | |
| R2459 | ATTGCTCCTTACGAGGAGACTTCCGTGTGGC | 1867 |
| Bax_CasPhi12_2_S | AGCTGA | |
| R2460 | ATTGCTCCTTACGAGGAGACCTGATGGCAAC | 1868 |
| Bax_CasPhi12_3_S | TTCAAC | |
| R2461 | ATTGCTCCTTACGAGGAGACTACTTTGCTAGC | 1869 |
| Bax_CasPhi12_4_S | AAACT | |
| R2462 | ATTGCTCCTTACGAGGAGACAGCACCAGTTT | 1870 |
| Bax_CasPhi12_5_S | GCTAGC | |
| R2463 | ATTGCTCCTTACGAGGAGACAACTGGGGCCG | 1871 |
| Bax_CasPhi12_6_S | GGTTGT | |
| R2865_Bax_CasPhi12_ | ATTGCTCCTTACGAGGAGACTTCTCTTTCCTG | 1872 |
| nsd_sg1_S | TAGGA | |
| R2866_Bax_CasPhi12_ | ATTGCTCCTTACGAGGAGACTCTTTCCTGTAG | 1873 |
| nsd_sg2_S | GATGA | |
| R2867_Bax_ | ATTGCTCCTTACGAGGAGACCCTGTAGGATG | 1874 |
| CasPhi12_nsd_sg3_S | ATTGCT | |
| R2868_Bax_ | ATTGCTCCTTACGAGGAGACCTGTAGGATGA | 1875 |
| CasPhi12_nsd_sg4_S | TTGCTA | |
| R2869_Bax_ | ATTGCTCCTTACGAGGAGACCTAATGTGGAT | 1876 |
| CasPhi12_nsd_sg5_S | ACTAAC | |
| R2870_Bax_ | ATTGCTCCTTACGAGGAGACTTCCGTGTGGC | 1877 |
| CasPhi12_nsd_sg6_S | AGCTGA | |
| R2871_Bax_ | ATTGCTCCTTACGAGGAGACCGTGTGGCAGC | 1878 |
| CasPhi12_nsd_sg7_S | TGACAT | |
| R2872_Bax_ | ATTGCTCCTTACGAGGAGACCCATCAGCAAA | 1879 |
| CasPhi12_nsd_sg8_S | CATGTC | |
| R2873_Bax_ | ATTGCTCCTTACGAGGAGACAAGTTGCCATC | 1880 |
| CasPhi12_nsd_sg9_S | AGCAAA | |
| R2874_Bax_ | ATTGCTCCTTACGAGGAGACGCTGATGGCAA | 1881 |
| CasPhi12_nsd_sg10_S | CTTCAA | |
| R2875_Bax_ | ATTGCTCCTTACGAGGAGACCTGATGGCAAC | 1882 |
| CasPhi12_nsd_sg11_S | TTCAAC | |
| R2876_Bax_ | ATTGCTCCTTACGAGGAGACAACTGGGGCCG | 1883 |
| CasPhi12_nsd_sg12_S | GGTTGT | |
| R2877_Bax_ | ATTGCTCCTTACGAGGAGACTTGCCCTTTTCT | 1884 |
| CasPhi12_nsd_sg13_S | ACTTT | |
| R2878_Bax_ | ATTGCTCCTTACGAGGAGACCCCTTTTCTACT | 1885 |
| CasPhi12_nsd_sg14_S | TTGCT | |
| R2879_Bax_ | ATTGCTCCTTACGAGGAGACCTAGCAAAGTA | 1886 |
| CasPhi12_nsd_sg15_S | GAAAAG | |
| R2880_Bax_ | ATTGCTCCTTACGAGGAGACGCTAGCAAAGT | 1887 |
| CasPhi12_nsd_sg16_S | AGAAAA | |
| R2881_Bax_ | ATTGCTCCTTACGAGGAGACTCTACTTTGCTA | 1888 |
| CasPhi12_nsd_sg17_S | GCAAA | |
| R2882_Bax_ | ATTGCTCCTTACGAGGAGACCTACTTTGCTAG | 1889 |
| CasPhi12_nsd_sg18_S | CAAAC | |
| R2883_Bax_ | ATTGCTCCTTACGAGGAGACTACTTTGCTAGC | 1890 |
| CasPhi12_nsd_sg19_S | AAACT | |
| R2884_Bax_ | ATTGCTCCTTACGAGGAGACGCTAGCAAACT | 1891 |
| CasPhi12_nsd_sg20_S | GGTGCT | |
| R2885_Bax_ | ATTGCTCCTTACGAGGAGACCTAGCAAACTG | 1892 |
| CasPhi12_nsd_sg21_S | GTGCTC | |
| R2886_Bax_ | ATTGCTCCTTACGAGGAGACAGCACCAGTTT | 1893 |
| CasPhi12_nsd_sg22_S | GCTAGC | |

TABLE AF
CasΦ.12 gRNAs targeting Fut8 in CHO cells

| | Repeat + spacer RNA Sequence (5′ → 3′), | SEQ ID |
|---|---|---|
| Name | shown as DNA) | NO |
| R2464 | ATTGCTCCTTACGAGGAGACCCACTTTGTCA | 1894 |
| Fut8_CasPhi12_1_S | GTGCGT | |
| R2465 | ATTGCTCCTTACGAGGAGACCTCAATGGGAT | 1895 |
| Fut8_CasPhi12_2_S | GGAAGG | |
| R2466 | ATTGCTCCTTACGAGGAGACAGGAATACATG | 1896 |
| Fut8_CasPhi12_3_S | GTACAC | |
| R2467 | ATTGCTCCTTACGAGGAGACAAGAACATTTT | 1897 |
| Fut8_CasPhi12_4_S | CAGCTT | |
| R2468 | ATTGCTCCTTACGAGGAGACATCCACTTTCAT | 1898 |
| Fut8_CasPhi12_5_S | TCTGC | |
| R2469 | ATTGCTCCTTACGAGGAGACTTTGTTAAAGG | 1899 |
| Fut8_CasPhi12_6_S | AGGCAA | |
| R2887_Fut8_CasPhi12_ | ATTGCTCCTTACGAGGAGACTCCCCAGAGTC | 1900 |
| nsd_sg1_S | CATGTC | |
| R2888_Fut8 | ATTGCTCCTTACGAGGAGACTCAGTGCGTCT | 1901 |
| CasPhi12_nsd_sg2_S | GACATG | |
| R2889_Fut8_CasPhi12_ | ATTGCTCCTTACGAGGAGACGTCAGTGCGTC | 1902 |
| nsd_sg3_S | TGACAT | |
| R2890_Fut8 | ATTGCTCCTTACGAGGAGACCCACTTTGTCA | 1903 |
| CasPhi12_nsd_sg4_S | GTGCGT | |
| R2891_Fut8 | ATTGCTCCTTACGAGGAGACTGTTCCCACTTT | 1904 |
| CasPhi12_nsd_sg5_S | GTCAG | |
| R2892_Fut8 | ATTGCTCCTTACGAGGAGACCTCAATGGGAT | 1905 |
| CasPhi12_nsd_sg6_S | GGAAGG | |
| R2893_Fut8 | ATTGCTCCTTACGAGGAGACCATCCCATTGA | 1906 |
| CasPhi12_nsd_sg7_S | GGAATA | |
| R2894_Fut8 | ATTGCTCCTTACGAGGAGACAGGAATACATG | 1907 |
| CasPhi12_nsd_sg8_S | GTACAC | |
| R2895_Fut8 | ATTGCTCCTTACGAGGAGACAACGTGTACCA | 1908 |
| CasPhi12_nsd_sg9_S | TGTATT | |
| R2896_Fut8 | ATTGCTCCTTACGAGGAGACTTCAACGTGTA | 1909 |
| CasPhi12_nsd_sg10_S | CCATGT | |
| R2897_Fut8 | ATTGCTCCTTACGAGGAGACAAGAACATTTT | 1910 |
| CasPhi12_nsd_sg11_S | CAGCTT | |
| R2898_Fut8 | ATTGCTCCTTACGAGGAGACGAGAAGCTGAA | 1911 |
| CasPhi12_nsd_sg12_S | AATGTT | |
| R2899_Fut8 | ATTGCTCCTTACGAGGAGACTCAGCTTCTCG | 1912 |
| CasPhi12_nsd_sg13_S | AACGCA | |
| R2900_Fut8 | ATTGCTCCTTACGAGGAGACCAGCTTCTCGA | 1913 |
| CasPhi12_nsd_sg14_S | ACGCAG | |
| R2901_Fut8 | ATTGCTCCTTACGAGGAGACTGCGTTCGAGA | 1914 |
| CasPhi12_nsd_sg15_S | AGCTGA | |
| R2902_Fut8 | ATTGCTCCTTACGAGGAGACAGCTTCTCGAA | 1915 |
| CasPhi12_nsd_sg16_S | CGCAGA | |
| R2903_Fut8 | ATTGCTCCTTACGAGGAGACATTCTGCGTTCG | 1916 |
| CasPhi12_nsd_sg17_S | AGAAG | |
| R2904_Fut8 | ATTGCTCCTTACGAGGAGACCATTCTGCGTTC | 1917 |
| CasPhi12_nsd_sg18_S | GAGAA | |
| R2905_Fut8 | ATTGCTCCTTACGAGGAGACTCGAACGCAGA | 1918 |
| CasPhi12_nsd_sg19_S | ATGAAA | |
| R2906_Fut8 | ATTGCTCCTTACGAGGAGACATCCACTTTCAT | 1919 |
| CasPhi12_nsd_sg20_S | TCTGC | |
| R2907_Fut8 | ATTGCTCCTTACGAGGAGACTATCCACTTTCA | 1920 |
| CasPhi12_nsd_sg21_S | TTCTG | |
| R2908_Fut8 | ATTGCTCCTTACGAGGAGACTTATCCACTTTC | 1921 |
| CasPhi12_nsd_sg22_S | ATTCT | |
| R2909_Fut8 | ATTGCTCCTTACGAGGAGACTTTATCCACTTT | 1922 |
| CasPhi12_nsd_sg23_S | CATTC | |
| R2910_Fut8 | ATTGCTCCTTACGAGGAGACTTTTATCCACTT | 1923 |
| CasPhi12_nsd_sg24_S | TCATT | |
| R2911_Fut8 | ATTGCTCCTTACGAGGAGACAACAAAGAAGG | 1924 |
| CasPhi12_nsd_sg25_S | GTCATC | |
| R2912_Fut8 | ATTGCTCCTTACGAGGAGACCCTCCTTTAACA | 1925 |
| CasPhi12_nsd_sg26_S | AAGAA | |
| R2913_Fut8 | ATTGCTCCTTACGAGGAGACGCCTCCTTTAAC | 1926 |
| CasPhi12_nsd_sg27_S | AAAGA | |
| R2914_Fut8 | ATTGCTCCTTACGAGGAGACTTTGTTAAAGG | 1927 |
| CasPhi12_nsd_sg28_S | AGGCAA | |
| R2915_Fut8 | ATTGCTCCTTACGAGGAGACGTTAAAGGAGG | 1928 |
| CasPhi12_nsd_sg29_S | CAAAGA | |
| R2916_Fut8 | ATTGCTCCTTACGAGGAGACTTAAAGGAGGC | 1929 |
| CasPhi12_nsd_sg30_S | AAAGAC | |
| R2917_Fut8 | ATTGCTCCTTACGAGGAGACTCTTTGCCTCCT | 1930 |
| CasPhi12_nsd_sg31_S | TTAAC | |
| R2918_Fut8 | ATTGCTCCTTACGAGGAGACGTCTTTGCCTCC | 1931 |
| CasPhi12_nsd_sg32_S | TTTAA | |
| R2919_Fut8 | ATTGCTCCTTACGAGGAGACGTCTAACTTACT | 1932 |
| CasPhi12_nsd_sg33_S | TTGTC | |
| R2920_Fut8 | ATTGCTCCTTACGAGGAGACTTGGTCTAACTT | 1933 |
| CasPhi12_nsd_sg34_S | ACTTT | |

TABLE AG
CasΦ.12 gRNAs targeting Fut8

| | | | Repeat | | |
|---|---|---|---|---|---|
| | Repeat | Spacer | sequence | Spacer sequence | crRNA sequence |
| Name | length | length | (5′ → 3′) | (5′ → 3′) | (5′ → 3′) |
| R3582 | 36 | 30 | CUUUCAAGA | AGGAAUACAU | CUUUCAAGACUAA |
| | | | CUAAUAGAU | GGUACACGUU | UAGAUUGCUCCUU |
| | | | UGCUCCUUA | GAAGAACAUU | ACGAGGAGACAGG |
| | | | CGAGGAGAC | (SEQ ID NO: | AAUACAUGGUACA |
| | | | (SEQ ID NO: | 1482) | CGUUGAAGAACAU |
| | | | 2469) | | U (SEQ ID NO: 1499) |
| R3583 | 36 | 29 | CUUUCAAGA | AGGAAUACAU | CUUUCAAGACUAA |
| | | | CUAAUAGAU | GGUACACGUU | UAGAUUGCUCCUU |
| | | | UGCUCCUUA | GAAGAACAU | ACGAGGAGACAGG |
| | | | CGAGGAGAC | (SEQ ID NO: | AAUACAUGGUACA |
| | | | (SEQ ID NO: | 1483) | CGUUGAAGAACAU |
| | | | 2469) | | (SEQ ID NO: 1500) |
| R3584 | 36 | 28 | CUUUCAAGA | AGGAAUACAU | CUUUCAAGACUAA |
| | | | CUAAUAGAU | GGUACACGUU | UAGAUUGCUCCUU |
| | | | UGCUCCUUA | GAAGAACA | ACGAGGAGACAGG |
| | | | CGAGGAGAC | (SEQ ID NO: | AAUACAUGGUACA |
| | | | (SEQ ID NO: | 1484) | CGUUGAAGAACA |
| | | | 2469) | | (SEQ ID NO: 1501) |
| R3585 | 36 | 27 | CUUUCAAGA | AGGAAUACAU | CUUUCAAGACUAA |
| | | | CUAAUAGAU | GGUACACGUU | UAGAUUGCUCCUU |
| | | | UGCUCCUUA | GAAGAAC | ACGAGGAGACAGG |
| | | | CGAGGAGAC | (SEQ ID NO: | AAUACAUGGUACA |
| | | | (SEQ ID NO: | 1485) | CGUUGAAGAAC |
| | | | 2469) | | (SEQ ID NO: 1502) |
| R3586 | 36 | 26 | CUUUCAAGA | AGGAAUACAU | CUUUCAAGACUAA |
| | | | CUAAUAGAU | GGUACACGUU | UAGAUUGCUCCUU |
| | | | UGCUCCUUA | GAAGAA (SEQ | ACGAGGAGACAGG |
| | | | CGAGGAGAC | ID NO: 1486) | AAUACAUGGUACA |
| | | | (SEQ ID NO: | | CGUUGAAGAA (SEQ |
| | | | 2469) | | ID NO: 1503) |
| R3587 | 36 | 25 | CUUUCAAGA | AGGAAUACAU | CUUUCAAGACUAA |
| | | | CUAAUAGAU | GGUACACGUU | UAGAUUGCUCCUU |
| | | | UGCUCCUUA | GAAGA (SEQ | ACGAGGAGACAGG |
| | | | CGAGGAGAC | ID NO: 1487) | AAUACAUGGUACA |
| | | | (SEQ ID NO: | | CGUUGAAGA (SEQ |
| | | | 2469) | | ID NO: 1504) |
| R3588 | 36 | 24 | CUUUCAAGA | AGGAAUACAU | CUUUCAAGACUAA |
| | | | CUAAUAGAU | GGUACACGUU | UAGAUUGCUCCUU |
| | | | UGCUCCUUA | GAAG (SEQ ID | ACGAGGAGACAGG |
| | | | CGAGGAGAC | NO: 1488) | AAUACAUGGUACA |
| | | | (SEQ ID NO: | | CGUUGAAG (SEQ ID |
| | | | 2469) | | NO: 1505) |
| R3589 | 36 | 23 | CUUUCAAGA | AGGAAUACAU | CUUUCAAGACUAA |
| | | | CUAAUAGAU | GGUACACGUU | UAGAUUGCUCCUU |
| | | | UGCUCCUUA | GAA (SEQ ID | ACGAGGAGACAGG |
| | | | CGAGGAGAC | NO: 1489) | AAUACAUGGUACA |
| | | | (SEQ ID NO: | | CGUUGAA (SEQ ID |
| | | | 2469) | | NO: 1506) |
| R3590 | 36 | 22 | CUUUCAAGA | AGGAAUACAU | CUUUCAAGACUAA |
| | | | CUAAUAGAU | GGUACACGUU | UAGAUUGCUCCUU |
| | | | UGCUCCUUA | GA (SEQ ID NO: | ACGAGGAGACAGG |
| | | | CGAGGAGAC | 1490) | AAUACAUGGUACA |
| | | | (SEQ ID NO: | | CGUUGA (SEQ ID |
| | | | 2469) | | NO: 1507) |
| R3591 | 36 | 21 | CUUUCAAGA | AGGAAUACAU | CUUUCAAGACUAA |
| | | | CUAAUAGAU | GGUACACGUU | UAGAUUGCUCCUU |
| | | | UGCUCCUUA | G (SEQ ID NO: | ACGAGGAGACAGG |
| | | | CGAGGAGAC | 1491) | AAUACAUGGUACA |
| | | | (SEQ ID NO: | | CGUUG (SEQ ID |
| | | | 2469) | | NO: 1508) |
| R3592 | 36 | 20 | CUUUCAAGA | AGGAAUACAU | CUUUCAAGACUAA |
| | | | CUAAUAGAU | GGUACACGUU | UAGAUUGCUCCUU |
| | | | UGCUCCUUA | (SEQ ID NO: | ACGAGGAGACAGG |
| | | | CGAGGAGAC | 1492) | AAUACAUGGUACA |
| | | | (SEQ ID NO: | | CGUU (SEQ ID |
| | | | 2469) | | NO: 1509) |
| R3593 | 36 | 19 | CUUUCAAGA | AGGAAUACAU | CUUUCAAGACUAA |
| | | | CUAAUAGAU | GGUACACGU | UAGAUUGCUCCUU |
| | | | UGCUCCUUA | (SEQ ID NO: | ACGAGGAGACAGG |
| | | | CGAGGAGAC | 1493) | AAUACAUGGUACA |
| | | | (SEQ ID NO: | | CGU (SEQ ID |
| | | | 2469) | | NO: 1510) |
| R3594 | 36 | 18 | CUUUCAAGA | AGGAAUACAU | CUUUCAAGACUAA |
| | | | CUAAUAGAU | GGUACACG | UAGAUUGCUCCUU |
| | | | UGCUCCUUA | (SEQ ID NO: | ACGAGGAGACAGG |
| | | | CGAGGAGAC | 1494) | AAUACAUGGUACA |
| | | | (SEQ ID NO: | | CG (SEQ ID NO: 1511) |
| | | | 2469) | | |
| R3595 | 36 | 17 | CUUUCAAGA | AGGAAUACAU | CUUUCAAGACUAA |
| | | | CUAAUAGAU | GGUACAC | UAGAUUGCUCCUU |
| | | | UGCUCCUUA | (SEQ ID NO: | ACGAGGAGACAGG |
| | | | CGAGGAGAC | 1495) | AAUACAUGGUACA |
| | | | (SEQ ID NO: | | C (SEQ ID NO: 1512) |
| | | | 2469) | | |
| R3596 | 36 | 16 | CUUUCAAGA | AGGAAUACAU | CUUUCAAGACUAA |
| | | | CUAAUAGAU | GGUACA (SEQ | UAGAUUGCUCCUU |
| | | | UGCUCCUUA | ID NO: 1496) | ACGAGGAGACAGG |
| | | | CGAGGAGAC | | AAUACAUGGUACA |
| | | | (SEQ ID NO: | | (SEQ ID NO: 1513) |
| | | | 2469) | | |
| R3597 | 36 | 15 | CUUUCAAGA | AGGAAUACAU | CUUUCAAGACUAA |
| | | | CUAAUAGAU | GGUAC (SEQ ID | UAGAUUGCUCCUU |
| | | | UGCUCCUUA | NO: 1497) | ACGAGGAGACAGG |
| | | | CGAGGAGAC | | AAUACAUGGUAC |
| | | | (SEQ ID NO: | | (SEQ ID NO: 1514) |
| | | | 2469) | | |
| R3598 | 35 | 20 | UUUCAAGAC | AGGAAUACAU | UUUCAAGACUAAU |
| | | | UAAUAGAUU | GGUACACGUU | AGAUUGCUCCUUA |
| | | | GCUCCUUAC | (SEQ ID NO: | CGAGGAGACAGGA |
| | | | GAGGAGAC | 1498) | AUACAUGGUACAC |
| | | | (SEQ ID NO: | | GUU (SEQ ID |
| | | | 1466) | | NO: 1515) |
| R3599 | 34 | 20 | UUCAAGACU | AGGAAUACAU | UUCAAGACUAAUA |
| | | | AAUAGAUUG | GGUACACGUU | GAUUGCUCCUUAC |
| | | | CUCCUUACG | (SEQ ID NO: | GAGGAGACAGGAA |
| | | | AGGAGAC | 1498) | UACAUGGUACACG |
| | | | (SEQ ID NO: | | UU (SEQ ID NO: 1516) |
| | | | 1467) | | |
| R3600 | 33 | 20 | UCAAGACUA | AGGAAUACAU | UCAAGACUAAUAG |
| | | | AUAGAUUGC | GGUACACGUU | AUUGCUCCUUACG |
| | | | UCCUUACGA | (SEQ ID NO: | AGGAGACAGGAAU |
| | | | GGAGAC (SEQ | 1498) | ACAUGGUACACGU |
| | | | ID NO: 1468) | | U (SEQ ID NO: 1517) |
| R3601 | 32 | 20 | CAAGACUAA | AGGAAUACAU | CAAGACUAAUAGA |
| | | | UAGAUUGCU | GGUACACGUU | UUGCUCCUUACGA |
| | | | CCUUACGAG | (SEQ ID NO: | GGAGACAGGAAUA |
| | | | GAGAC (SEQ | 1498) | CAUGGUACACGUU |
| | | | ID NO: 1469) | | (SEQ ID NO: 1518) |
| R3602 | 31 | 20 | AAGACUAAU | AGGAAUACAU | AAGACUAAUAGAU |
| | | | AGAUUGCUC | GGUACACGUU | UGCUCCUUACGAG |
| | | | CUUACGAGG | (SEQ ID NO: | GAGACAGGAAUAC |
| | | | AGAC (SEQ ID | 1498) | AUGGUACACGUU |
| | | | NO: 1470) | | (SEQ ID NO: 1519) |
| R3603 | 30 | 20 | AGACUAAUA | AGGAAUACAU | AGACUAAUAGAUU |
| | | | GAUUGCUCC | GGUACACGUU | GCUCCUUACGAGG |
| | | | UUACGAGGA | (SEQ ID NO: | AGACAGGAAUACA |
| | | | GAC (SEQ ID | 1498) | UGGUACACGUU |
| | | | NO: 1471) | | (SEQ ID NO: 1520) |
| R3604 | 29 | 20 | GACUAAUAG | AGGAAUACAU | GACUAAUAGAUUG |
| | | | AUUGCUCCU | GGUACACGUU | CUCCUUACGAGGA |
| | | | UACGAGGAG | (SEQ ID NO: | GACAGGAAUACAU |
| | | | AC (SEQ ID | 1498) | GGUACACGUU (SEQ |
| | | | NO: 1472) | | ID NO: 1521) |
| R3605 | 28 | 20 | ACUAAUAGA | AGGAAUACAU | ACUAAUAGAUUGC |
| | | | UUGCUCCUU | GGUACACGUU | UCCUUACGAGGAG |
| | | | ACGAGGAGA | (SEQ ID NO: | ACAGGAAUACAUG |
| | | | C (SEQ ID NO: | 1498) | GUACACGUU (SEQ |
| | | | 1473) | | ID NO: 1522) |
| R3606 | 27 | 20 | CUAAUAGAU | AGGAAUACAU | CUAAUAGAUUGCU |
| | | | UGCUCCUUA | GGUACACGUU | CCUUACGAGGAGA |
| | | | CGAGGAGAC | (SEQ ID NO: | CAGGAAUACAUGG |
| | | | (SEQ ID NO: | 1498) | UACACGUU (SEQ ID |
| | | | 1474) | | NO: 1523) |
| R3607 | 26 | 20 | UAAUAGAUU | AGGAAUACAU | UAAUAGAUUGCUC |
| | | | GCUCCUUAC | GGUACACGUU | CUUACGAGGAGAC |
| | | | GAGGAGAC | (SEQ ID NO: | AGGAAUACAUGGU |
| | | | (SEQ ID NO: | 1498) | ACACGUU (SEQ ID |
| | | | 1475) | | NO: 1524) |
| R3608 | 25 | 20 | AAUAGAUUG | AGGAAUACAU | AAUAGAUUGCUCC |
| | | | CUCCUUACG | GGUACACGUU | UUACGAGGAGACA |
| | | | AGGAGAC | AGGAAUACAU | GGAAUACAUGGUA |
| | | | (SEQ ID NO: | GGUACACGUU | CACGUU (SEQ ID |
| | | | 1476) | (SEQ ID NO: | NO: 1525) |
| | | | | 2487) | |
| R3609 | 24 | 20 | AUAGAUUGC | AGGAAUACAU | AUAGAUUGCUCCU |
| | | | UCCUUACGA | GGUACACGUU | UACGAGGAGACAG |
| | | | GGAGAC (SEQ | AGGAAUACAU | GAAUACAUGGUAC |
| | | | ID NO: 1477) | GGUACACGUU | ACGUU (SEQ ID |
| | | | | (SEQ ID NO: | NO: 1526) |
| | | | | 2487) | |
| R3610 | 23 | 20 | UAGAUUGCU | AGGAAUACAU | UAGAUUGCUCCUU |
| | | | CCUUACGAG | GGUACACGUU | ACGAGGAGACAGG |
| | | | GAGAC (SEQ | AGGAAUACAU | AAUACAUGGUACA |
| | | | ID NO: 1478) | GGUACACGUU | CGUU (SEQ ID |
| | | | | (SEQ ID NO: | NO: 1527) |
| | | | | 2487) | |
| R3611 | 22 | 20 | AGAUUGCUC | AGGAAUACAU | AGAUUGCUCCUUA |
| | | | CUUACGAGG | GGUACACGUU | CGAGGAGACAGGA |
| | | | AGAC (SEQ ID | AGGAAUACAU | AUACAUGGUACAC |
| | | | NO: 1479) | GGUACACGUU | GUU (SEQ ID |
| | | | | (SEQ ID NO: | NO: 1528) |
| | | | | 2487) | |
| R3612 | 21 | 20 | GAUUGCUCC | AGGAAUACAU | GAUUGCUCCUUAC |
| | | | UUACGAGGA | GGUACACGUU | GAGGAGACAGGAA |
| | | | GAC (SEQ ID | AGGAAUACAU | UACAUGGUACACG |
| | | | NO: 1480) | GGUACACGUU | UU (SEQ ID NO: 1529) |
| | | | | (SEQ ID NO: | |
| | | | | 2487) | |
| R3613 | 20 | 20 | AUUGCUCCU | AGGAAUACAU | AUUGCUCCUUACG |
| | | | UACGAGGAG | GGUACACGUU | AGGAGACAGGAAU |
| | | | AC (SEQ ID | AGGAAUACAU | ACAUGGUACACGU |
| | | | NO: 1481) | GGUACACGUU | U (SEQ ID NO: 1530) |
| | | | | (SEQ ID NO: | |
| | | | | 2487) | |

TABLE AH
CasΦ.12 gRNAs targeting B2M and TRAC

| | | | Repeat | Spacer | |
|---|---|---|---|---|---|
| | | | sequence | sequence | crRNA sequence |
| Name | Target | Modification | (5′ → 3′) | (5′ → 3′) | (5′ → 3′) |
| R3150 | B2M | Unmodified, | AUUGCUC | CAGUGGGGG | AUUGCUCCUUAC |
| 20-20 | Exon 2 | 2′OMe at last | CUUACGA | UGAAUUCAG | GAGGAGACCAG |
| | | 3′ base (1me) | GGAGAC | UG (SEQ ID | UGGGGGUGAAU |
| | | 2′OMe at last | (SEQ ID NO: | NO: 1434) | UCAGUG (SEQ ID |
| | | two 3′ bases | 1433) | | NO: 1435) |
| | | (2me) | | | |
| | | 2′OMe at last | | | |
| | | three 3′ bases | | | |
| | | (3me) | | | |
| R3042 | TRAC | Unmodified, | AUUGCUC | GAGUCUCUC | AUUGCUCCUUAC |
| 20-20 | Exon 1 | 1me | CUUACGA | AGCUGGUAC | GAGGAGACGAG |
| | | 2me | GGAGAC | AC (SEQ ID | UCUCUCAGCUGG |
| | | 3me | (SEQ ID NO: | NO: 1436) | UACAC (SEQ ID |
| | | | 1433) | | NO: 1437) |
| R3150 | B2M | Unmodified, | AUUGCUC | CAGUGGGGG | AUUGCUCCUUAC |
| 20-17 | Exon 2 | 1me | CUUACGA | UGAAUUCA | GAGGAGACCAG |
| | | 2me | GGAGAC | (SEQ ID NO: | UGGGGGUGAAU |
| | | 3me | (SEQ ID NO: | 1438) | UCA (SEQ ID NO: |
| | | | 1433) | | 1439) |
| R3042 | TRAC | Unmodified, | AUUGCUC | CAGUGGGGG | AUUGCUCCUUAC |
| 20-17 | Exon 1 | 1me | CUUACGA | UGAAUUCA | GAGGAGACGAG |
| | | 2me | GGAGAC | (SEQ ID NO: | UCUCUCAGCUGG |
| | | 3me | (SEQ ID NO: | 1440) | UA (SEQ ID NO: |
| | | | 1433) | | 1441) |

[0248] In some embodiments, the guide nucleic acid comprises a spacer sequence that is the same as or differs by no more than 5 nucleotides from a spacer sequence from Tables A to H by no more than 4 nucleotides from a spacer sequence from Tables A to H, by no more than 3 nucleotides from a spacer sequence from Tables A to H, no more than 2 nucleotides from a spacer sequence from Tables A to H, or no more than 1 nucleotide from a spacer sequence from Tables A to H. A difference may be addition, deletion or substitution and where there are multiple differences, the differences may be addition, deletion and/or substitution.

[0249] In some embodiments, the guide nucleic acid comprises a sequence that is the same as or differs by no more than 5 nucleotides from a sequence from Tables I to AH by no more than 4 nucleotides from a sequence from Tables I to AH, by no more than 3 nucleotides from a sequence from Tables I to X, no more than 2 nucleotides from a sequence from Table I to AH, or no more than 1 nucleotide from a sequence from Tables I to AH. A difference may be addition, deletion or substitution and where there are multiple differences, the differences may be addition, deletion and/or substitution.

[0250] In some embodiments, the guide nucleic acid comprises a sequence that is at least 30, at least 31, at least 32, at least 33, at least 34, at least 35, at least 36, at least 37, at least 38, at least 39, at least 40, at least 41, at least 42, at least 43, at least 44, at least 45, at least 46, at least 47, at least 48, at least 49, at least 50, at least 51, at least 52, at least 53, at least 54, at least 55, at least 56 or at least 57 contiguous nucleobases of a sequence from Tables I to X, AG and AH (SEQ ID NO: 547-1404, 1433-1441, 1466-1530 or 2112-2289).

[0251] In some embodiments, the guide nucleic acid comprises a sequence that is 30, 31, 32, 33, 34, 35, 36, 37, 38, 39, 40, 41, 42, 43, 44, 45, 46, 47, 48, 49, 50, 51, 52, 53, 54, 55, 56 or 57 contiguous nucleobases of a sequence from Tables I to X, AG and AH (SEQ ID NO: 547-1404, 1433-1441, 1466-1530 or 2112-2289).

[0252] In some embodiments, the guide nucleic acid comprises a sequence that is at least 30, at least 31, at least 32, at least 33, at least 34, at least 35, at least 36 or at least 37 contiguous nucleobases of a sequence from Tables Y to AF (SEQ ID NO: 1533-1933 or 2290-2467).

[0253] In some embodiments, the guide nucleic acid comprises a sequence that is 30, 31, 32, 33, 34, 35, 36 or 37 contiguous nucleobases of a sequence from Tables Y to AF (SEQ ID NO: 1533-1933 or 2290-2467).

[0254] In some embodiments, the guide nucleic acid comprises a repeat sequence from Table 2 and a spacer sequence from Tables A to H

[0255] In the sequences provided in Tables A-AH, the base T is interchangeable with U when a guide nucleic either is or comprises ribonucleic or deoxyribonucleic nucleosides.

### Coding Sequences and Expression Vectors

[0256] In some aspects, the present disclosure provides a nucleic acid encoding a programmable CasΦ nuclease disclosed herein. In some embodiments, the nucleic acid is a vector, preferably the vector is an expression vector. Suitable expression vectors are easily identifiable for the cell type of interest. For example, an expression vector comprises a suitable promoter for transcription in the cell type of interest. An expression vector can also include other elements to support transcription, such as a Woodchuck Hepatitis Virus (WHP) Posttranscriptional regulatory Element (WPRE).

[0257] In some embodiments, a nucleic acid encoding a programmable CasΦ nuclease (e.g. within an expression vector) comprises elements suitable for expression in a eukaryotic cell. In some embodiments, the nucleic acid comprises a promoter suitable for transcription in a eukaryotic cell e.g. containing a TATA box and/or a TFIIB recognition element. The nucleic acid (e.g. within an expression vector) will typically include a promoter suitable for transcription in a eukaryotic cell upstream of the sequence encoding the programmable CasΦ nuclease, and may include a transcription terminator downstream of the sequence encoding the programmable CasΦ nuclease. The nucleic acid (e.g. within an expression vector) may also include enhancer(s) upstream and/or downstream of the sequence encoding the programmable CasΦ nuclease. A promoter may be an inducible promoter. The nucleic acid may also comprise a guide RNA. Suitable promoters are well known in the art and include the CMV promoter, EF1a promoter, intron-less EF1a short promoter, SV40 promoter, human or mouse PGK1 promoter, Ubc (ubiquitin C) promoter and mouse or human U6 promoter. Suitable mammalian promoters include the EF1a promoter, intron-less EF1a short promoter, and human U6 promoter.

[0258] In some embodiments, the vector is a viral vector. In some embodiments, the vector is a retroviral vector or a lentiviral vector. In preferred embodiments, the vector is an adeno-associated viral (AAV) vector. Several serotypes are available for AAV vectors that can be used in the compositions and methods disclosed herein, including AAV1, AAV2, AAV5, AAV6, AAV8, AAV9 and AAV DJ. In more preferred embodiments, the AAV vector is an AAV DJ vector.

[0259] A vector may be integrated into a host cell genome.

[0260] In some embodiments, a vector comprises a nucleic acid encoding a programmable CasΦ nuclease. In some embodiments, a vector comprises a nucleic acid encoding a guide nucleic acid. In some embodiments, a vector comprises a donor polynucleotide. In some embodiments, a nucleic acid encoding a programmable CasΦ nuclease, a nucleic acid encoding a guide nucleic acid and a donor polynucleotide are comprised by separate vectors. In some embodiments, a vector comprises a nucleic acid encoding a programmable CasΦ nuclease and a nucleic acid encoding a guide nucleic acid.

[0261] It is well known in the field that the large size of Cas9 nucleases makes Cas9 impractical for several applications. For example, packaging vectors into viral particles becomes more difficult as the size of the vector increases. It is therefore difficult to include other components in a viral vector that includes a nucleic acid encoding a Cas9 nuclease. Accordingly, one of the advantages of the programmable CasΦ nucleases disclosed herein arises from the smaller size of the programmable CasΦ nucleases which allows vectors comprising a nucleic acid encoding a programmable CasΦ nuclease to be easily packaged into viral particles when the vector also includes nucleic acids encoding other components, such a nucleic acid encoding a guide nucleic acid and/or donor polynucleotide. In preferred embodiments, a vector encodes a nucleic acid encoding a programmable CasΦ nuclease and a nucleic acid encoding a guide nucleic acid. In preferred embodiments, a vector encodes a nucleic acid encoding a programmable CasΦ nuclease, a nucleic acid encoding a guide nucleic acid and a donor polynucleotide. In some preferred embodiments, a vector comprises up to 1 kb donor polynucleotide, a promoter for expression of a guide nucleic acid, a nucleic acid encoding the nucleic acid, a mammalian promoter for expression of a programmable CasΦ nuclease, a nucleic acid encoding the programmable CasΦ nuclease, and a polyA signal. In alternative preferred embodiments, the donor polynucleotide is included in a nucleic acid encoding a tag, such as a fluorescent protein. In further preferred embodiments, the programmable CasΦ nuclease encoded by the vector is fused or linked to two nuclear localization signals.

[0262] In some embodiments, the expression vector comprises elements suitable for expression in a prokaryotic cell. In some embodiments, the expression vector comprises a promoter suitable for transcription in a prokaryotic cell e.g. comprising a Shine Dalgarno sequence.

[0263] In some embodiments, a CasΦ nuclease, a guide nucleic acid, or a nucleic acid encoding any combination thereof, may be inserted into a host cell by manner of electroporation, nucleofection, chemical methods, transfection, transduction, transformation, or microinjection. In some embodiments, a CasΦ nuclease, a guide nucleic acid, or a nucleic acid encoding any combination thereof, may be introduced into a cell by squeezing the cell to deform it, thereby disrupting the cell membrane and allowing the CasΦ nuclease, the guide nucleic acid, or the nucleic acid encoding any combination thereof, to pass into the cell.

[0264] In some embodiments, an Amaxa 4D nucleofector may be used to carry out nucleofection. In some embodiments, the chemical method or transfection comprises lipofectamine.

[0265] Lipid nanoparticle (LNP) delivery is one of the most clinically advanced non-viral delivery systems for gene therapy. LNPs have many properties that make them ideal candidates for delivery of nucleic acids, including ease of manufacture, low cytotoxicity and immunogenicity, high efficiency of nucleic acid encapsulation and cell transfection, multidosing capabilities and flexibility of design (Kulkarni et al., (2018) Nucleic Acid Therapeutics). In some embodiments, LNP is used to deliver a nucleic acid encoding a programmable CasΦ nuclease described herein. In some embodiments, LNP is used to deliver a nucleic acid encoding a guide nucleic acid. In some embodiments, LNP is used to deliver a nucleic acid encoding a programmable CasΦ nuclease and a guide nucleic acid. In some embodiments, the LNP has an amine group to phosphate (N/P) ratio of between 2 and 10, between 3 and 10, or between 5 and 9. In preferred embodiments, the LNP has a N/P ratio of between 5 and 9. In more preferred embodiments, the LNP has a N/P ratio of 5. In some embodiments, the LNP additional components, e.g., nucleic acids, proteins, peptides, small molecules, sugars, lipids.

[0266] In more preferred embodiments, the LNP has a N/P ratio of 4 to 5. In preferred embodiments, the LNP comprises a nucleic acid encoding a programmable CasΦ nuclease, and the LNP has an N/P ratio of 4 to 5.

### Target Nucleic Acid and Sample

[0267] A wide array of samples is compatible with the compositions and methods disclosed herein. The samples, as described herein, may be used in the methods of nicking a target nucleic acid disclosed herein. The samples, as described herein, may be used in the DETECTR assay methods disclosed herein. The samples, as described herein, are compatible with any of the programmable nucleases disclosed herein and use of said programmable nuclease in a method of detecting a target nucleic acid. The samples, as described herein, are compatible with any of the compositions comprising a programmable nuclease and a buffer. Described herein are samples that contain deoxyribonucleic acid (DNA), ribonucleic acid (RNA), or both, which can be modified or detected using a programmable nuclease of the present disclosure. As described herein, programmable nucleases are activated upon binding to a target nucleic acid of interest in a sample upon hybridization of a guide nucleic acid to the target nucleic acid. Subsequently, the activated programmable nucleases exhibit sequence-independent cleavage of a nucleic acid in a reporter. The reporter additionally includes a detectable moiety, which is released upon sequence-independent cleavage of the nucleic acid in the reporter. The detectable moiety emits a detectable signal, which can be measured by various methods (e.g., spectrophotometry, fluorescence measurements, electrochemical measurements).

[0268] Various sample types comprising a target nucleic acid of interest are consistent with the present disclosure. These samples can comprise a target nucleic acid sequence for detection. In some embodiments, the detection of the target nucleic indicates an ailment, such as a disease, cancer, or genetic disorder, or genetic information, such as for phenotyping, genotyping, or determining ancestry and are compatible with the reagents and support mediums as described herein. Generally, a sample from an individual or an animal or an environmental sample can be obtained to test for presence of a disease, cancer, genetic disorder, or any mutation of interest. A biological sample from the individual may be blood, serum, plasma, saliva, urine, mucosal sample, peritoneal sample, cerebrospinal fluid, gastric secretions, nasal secretions, sputum, pharyngeal exudates, urethral or vaginal secretions, an exudate, an effusion, or tissue. A tissue sample may be dissociated or liquified prior to application to detection system of the present disclosure. A sample from an environment may be from soil, air, or water. In some instances, the environmental sample is taken as a swab from a surface of interest or taken directly from the surface of interest. In some instances, the raw sample is applied to the detection system. In some instances, the sample is diluted with a buffer or a fluid or concentrated prior to application to the detection system or be applied neat to the detection system. Sometimes, the sample is contained in no more 20 μl. The sample, in some cases, is contained in no more than 1, 5, 10, 15, 20, 25, 30, 35 40, 45, 50, 55, 60, 65, 70, 75, 80, 90, 100, 200, 300, 400, 500 μl, or any of value from 1 μl to 500 μl, preferably from 10 μL to 200 μL, or more preferably from 50 μL to 100 μL. Sometimes, the sample is contained in more than 500 μl.

[0269] In some embodiments, the target nucleic acid is single-stranded DNA. The methods, reagents, enzymes, and kits disclosed herein may enable the direct detection of a DNA encoding a sequence of interest, in particular a single-stranded DNA encoding a sequence of interest, without transcribing the DNA into RNA, for example, by using an RNA polymerase. The compositions and methods disclosed herein may enable the detection of target nucleic acid that is an amplified nucleic acid of a nucleic acid of interest. In some embodiments, the target nucleic acid is a cDNA, genomic DNA, an amplicon of genomic DNA or a DNA amplicon of an RNA. A nucleic acid can encode a sequence from a genomic locus. In some cases, the target nucleic acid that binds to the guide nucleic acid is from 5 to 100, 5 to 90, 5 to 80, 5 to 70, 5 to 60, 5 to 50, 5 to 40, 5 to 30, 5 to 25, 5 to 20, 5 to 15, or 5 to 10 nucleotides in length. The nucleic acid can be from 10 to 90, from 20 to 80, from 30 to 70, or from 40 to 60 nucleotides in length. A nucleic acid can be 5, 6, 7, 8, 9, 10, 11, 12, 13, 14, 15, 16, 17, 18, 19, 20, 21, 22, 23, 24, 25, 26, 27, 28, 29, 30, 31, 32, 33, 34, 35, 36, 37, 38, 39, 40, 45, 50, 60, 70, 80, 90, or 100 nucleotides in length. The target nucleic acid can encode a sequence reverse complementary to a guide nucleic acid sequence.

[0270] In some instances, the sample is taken from single-cell eukaryotic organisms; a plant or a plant cell; an algal cell; a fungal cell; an animal cell, tissue, or organ; a cell, tissue, or organ from an invertebrate animal; a cell, tissue, fluid, or organ from a vertebrate animal such as fish, amphibian, reptile, bird, and mammal; a cell, tissue, fluid, or organ from a mammal such as a human, a non-human primate, an ungulate, a feline, a bovine, an ovine, and a caprine. In some instances, the sample is taken from nematodes, protozoans, helminths, or malarial parasites. In some cases, the sample comprises nucleic acids from a cell lysate from a eukaryotic cell, a mammalian cell, a human cell, a prokaryotic cell, or a plant cell. In some cases, the sample comprises nucleic acids expressed from a cell.

[0271] The sample described herein may comprise at least one target nucleic acid. The target nucleic acid comprises a segment that is reverse complementary to a segment of a guide nucleic acid. Often, the sample comprises the segment of the target nucleic acid and at least one nucleic acid comprising at least 50% sequence identity to a segment of the target nucleic acid. Sometimes, the at least one nucleic acid comprises a segment comprising at least 60%, 70%, 75%, 80%, 85%, 90%, 91%, 92%, 93%, 94%, 95%, 96%, 97%, 98%, or 99% sequence identity to the segment of the target nucleic acid. Often, a sample comprises the segment of the target nucleic acid and at least one nucleic acid a segment comprising less than 100% sequence identity to the target nucleic acid but no less than 50% sequence identity to the segment of the target nucleic acid. Sometimes, a sample comprises the segment of the target nucleic acid and at least one nucleic acid a segment comprising less than 100% sequence identity to the target nucleic acid but no less than 60%, 70%, 75%, 80%, 85%, 90%, 91%, 92%, 93%, 94%, 95%, 96%, 97%, 98%, or 99% sequence identity to the segment of the target nucleic acid. For example, the segment of the target nucleic acid comprises a mutation as compared to at least one nucleic acid comprising a segment comprising less than 100% sequence identity to the segment of the target nucleic acid but no less than 50% sequence identity to the segment of the target nucleic acid. Sometimes, the segment of the target nucleic acid comprises a mutation as compared to at least one nucleic acid comprising a segment comprising less than 100% sequence identity to the segment of the target nucleic acid but no less than 60%, 70%, 75%, 80%, 85%, 90%, 91%, 92%, 93%, 94%, 95%, 96%, 97%, 98%, or 99% sequence identity to the segment of the target nucleic acid. Often, the segment of the target nucleic acid comprises a mutation as compared to at least one nucleic acid comprising a segment comprising less than 100% sequence identity to the segment of the target nucleic acid but no less than 50% sequence identity to the segment of the target nucleic acid. The mutation can be a mutation of 1, 2, 3, 4, 5, 6, 7, 8, 9, 10, 11, 12, 13, 14, 15, 16, 17, 18, 19, 20 or more nucleotides. Often, the mutation is a single nucleotide mutation. The single nucleotide mutation can be a single nucleotide polymorphism (SNP), which is a single base pair variation in a DNA sequence present in less than 1% of a population. Sometimes, the target nucleic acid comprises a single nucleotide mutation, wherein the single nucleotide mutation comprises the wild type variant of the SNP. The single nucleotide mutation or SNP can be associated with a phenotype of the sample or a phenotype of the organism from which the sample was taken. The SNP, in some cases, is associated with altered phenotype from wild type phenotype. Often, the segment of the target nucleic acid sequence comprises a deletion as compared to at least one nucleic acid comprising a segment comprising less than 100% sequence identity to the segment of the target nucleic acid but no less than 50% sequence identity to the segment of the target nucleic acid. The mutation can be a deletion of 1, 2, 3, 4, 5, 6, 7, 8, 9, 10, 11, 12, 13, 14, 15, 16, 17, 18, 19, 20 or more nucleotides. The mutation can be a deletion of about 5, about 10, about 15, about 20, about 25, about 30, about 35, about 40, about 45, about 50, about 55, about 60, about 65, about 70, about 75, about 80, about 85, about 90, about 95, about 100, about 200, about 300, about 400, about 500, about 600, about 700, about 800, about 900, or about 1000 nucleotides. The mutation can be a deletion of from 1 to 5, from 5 to 10, from 10 to 15, from 15 to 20, from 20 to 25, from 25 to 30, from 30 to 35, from 35 to 40, from 40 to 45, from 45 to 50, from 50 to 55, from 55 to 60, from 60 to 65, from 65 to 70, from 70 to 75, from 75 to 80, from 80 to 85, from 85 to 90, from 90 to 95, from 95 to 100, from 100 to 200, from 200 to 300, from 300 to 400, from 400 to 500, from 500 to 600, from 600 to 700, from 700 to 800, from 800 to 900, from 900 to 1000, from 1 to 50, from 1 to 100, from 25 to 50, from 25 to 100, from 50 to 100, from 100 to 500, from 100 to 1000, or from 500 to 1000 nucleotides. The segment of the target nucleic acid that the guide nucleic acid of the methods describe herein binds to comprises the mutation, such as the SNP or the deletion. The mutation can be a single nucleotide mutation or a SNP. The SNP can be a synonymous substitution or a nonsynonymous substitution. The nonsynonymous substitution can be a missense substitution or a nonsense point mutation. The synonymous substitution can be a silent substitution. The mutation can be a deletion of one or more nucleotides. Often, the single nucleotide mutation, SNP, or deletion is associated with a disease such as cancer or a genetic disorder. The mutation, such as a single nucleotide mutation, a SNP, or a deletion, can be encoded in the sequence of a target nucleic acid from the germline of an organism or can be encoded in a target nucleic acid from a diseased cell, such as a cancer cell.

[0272] The sample used for disease testing may comprise at least one target nucleic acid that can bind to a guide nucleic acid of the reagents described herein. The sample used for disease testing may comprise at least nucleic acid of interest that is amplified to produce a target nucleic acid that can bind to a guide nucleic acid of the reagents described herein. The nucleic acid of interest can comprise DNA, RNA, or a combination thereof.

[0273] The target nucleic acid (e.g., a target DNA) may be a portion of a nucleic acid from a virus or a bacterium or other agents responsible for a disease in the sample. The target nucleic acid may be a portion of a nucleic acid from a gene expressed in a cancer or genetic disorder in the sample. In some cases, the sequence is a segment of a target nucleic acid sequence. A segment of a target nucleic acid sequence can be from a genomic locus, a transcribed mRNA, or a reverse transcribed cDNA. A segment of a target nucleic acid sequence can be from 5 to 100, 5 to 90, 5 to 80, 5 to 70, 5 to 60, 5 to 50, 5 to 40, 5 to 30, 5 to 25, 5 to 20, 5 to 15, or 5 to 10 nucleotides in length. A segment of a target nucleic acid sequence can be 5, 6, 7, 8, 9, 10, 11, 12, 13, 14, 15, 16, 17, 18, 19, 20, 21, 22, 23, 24, 25, 26, 27, 28, 29, 30, 31, 32, 33, 34, 35, 36, 37, 38, 39, 40, 45, 50, 60, 70, 80, 90, or 100 nucleotides in length. The sequence of the target nucleic acid segment can be reverse complementary to a segment of a guide nucleic acid sequence. The target nucleic acid may comprise a genetic variation (e.g., a single nucleotide polymorphism), with respect to a standard sample, associated with a disease phenotype or disease predisposition. The target nucleic acid may be an amplicon of a portion of an RNA, may be a DNA, or may be a DNA amplicon from any organism in the sample.

[0274] In some embodiments, the target nucleic acid sequence comprises a nucleic acid sequence of a virus or a bacterium or other agents responsible for a disease in the sample. In some embodiments, the target nucleic acid comprises DNA that is reverse transcribed from RNA using a reverse transcriptase prior to detection by a programmable nuclease using the compositions, systems, and methods disclosed herein. The target nucleic acid, in some cases, is a portion of a nucleic acid from a sexually transmitted infection or a contagious disease, in the sample. In some cases, the target nucleic acid is a portion of a nucleic acid from a genomic locus, or any DNA amplicon, such as a reverse transcribed mRNA or a cDNA from a gene locus, a transcribed mRNA, or a reverse transcribed cDNA from a gene locus in at least one of: human immunodeficiency virus (HIV), human papillomavirus (HPV), chlamydia, gonorrhea, syphilis, trichomoniasis, sexually transmitted infection, malaria, Dengue fever, Ebola, chikungunya, and leishmaniasis. Pathogens include viruses, fungi, helminths, protozoa, malarial parasites, Plasmodium parasites, Toxoplasma parasites, and Schistosoma parasites. Helminths include roundworms, heartworms, and phytophagous nematodes, flukes, Acanthocephala, and tapeworms. Protozoan infections include infections from Giardia spp., Trichomonas spp., African trypanosomiasis, amoebic dysentery, babesiosis, balantidial dysentery, Chaga's disease, coccidiosis, malaria and toxoplasmosis. Examples of pathogens such as parasitic/protozoan pathogens include, but are not limited to: Plasmodium falciparum, P. vivax, Trypanosoma cruzi and Toxoplasma gondii. Fungal pathogens include, but are not limited to Cryptococcus neoformans, Histoplasma capsulatum, Coccidioides immitis, Blastomyces dermatitidis, Chlamydia trachomatis, and Candida albicans. Pathogenic viruses include but are not limited to coronavirus; immunodeficiency virus (e.g., HIV); influenza virus; dengue; West Nile virus; herpes virus; yellow fever virus; Hepatitis Virus C; Hepatitis Virus A; Hepatitis Virus B; papillomavirus; and the like. Pathogens include, e.g., HIV virus, Mycobacterium tuberculosis, Streptococcus agalactiae, methicillin-resistant Staphylococcus aureus, Legionella pneumophila, Streptococcus pyogenes, Escherichia coli, Neisseria gonorrhoeae, Neisseria meningitidis, Pneumococcus, Cryptococcus neoformans, Histoplasma capsulatum, Hemophilus influenzae B, Treponema pallidum, Lyme disease spirochetes, Pseudomonas aeruginosa, Mycobacterium leprae, Brucella abortus, rabies virus, influenza virus, cytomegalovirus, herpes simplex virus I, herpes simplex virus II, human serum parvo-like virus, respiratory syncytial virus (RSV), M. genitalium, T. vaginalis, varicella-zoster virus, hepatitis B virus, hepatitis C virus, measles virus, adenovirus, human T-cell leukemia viruses, Epstein-Barr virus, murine leukemia virus, mumps virus, vesicular stomatitis virus, Sindbis virus, lymphocytic choriomeningitis virus, wart virus, blue tongue virus, Sendai virus, feline leukemia virus, Reovirus, polio virus, simian virus 40, mouse mammary tumor virus, dengue virus, rubella virus, West Nile virus, Plasmodium falciparum, Plasmodium vivax, Toxoplasma gondii, Trypanosoma rangeli, Trypanosoma cruzi, Trypanosoma rhodesiense, Trypanosoma brucei, Schistosoma mansoni, Schistosoma japonicum, Babesia bovis, Eimeria tenella, Onchocerca volvulus, Leishmania tropica, Mycobacterium tuberculosis, Trichinella spiralis, Theileria parva, Taenia hydatigena, Taenia ovis, Taenia saginata, Echinococcus granulosus, Mesocestoides corti, Mycoplasma arthritidis, M. hyorhinis, M orale, M. arginini, Acholeplasma laidlawii, M. salivarium and M. pneumoniae. In some cases, the target sequence is a portion of a nucleic acid from a genomic locus, a transcribed mRNA, or a reverse transcribed cDNA from a gene locus of bacterium or other agents responsible for a disease in the sample comprising a mutation that confers resistance to a treatment, such as a single nucleotide mutation that confers resistance to antibiotic treatment. In some cases, the mutation that confers resistance to a treatment is a deletion.

[0275] Compositions and methods of the disclosure can be used for cell line engineering (e.g., engineering a cell from a cell line for bioproduction). For example, compositions and methods of the disclosure can be used to express a desired protein from a cell line. In some embodiments, the target nucleic acid sequence comprises a nucleic acid sequence of a cell line. In some embodiments, the target nucleic acid sequence comprises a genomic nucleic acid sequence of a cell line. In some embodiments, the cell line is a Chinese hamster ovary cell line (CHO), human embryonic kidney cell line (HEK), cell lines derived from cancer cells, cell lines derived from lymphocytes, and the like. Non-limiting examples of cell lines includes: C8161, CCRF-CEM, MOLT, mIMCD-3, NHDF, HeLa-S3, Huh1, Huh4, Huh7, HUVEC, HASMC, HEKn, HEKa, MiaPaCell, Panc1, PC-3, TF1, CTLL-2, CIR, Rat6, CV1, RPTE, A10, T24, J82, A375, ARH-77, Calu1, SW480, SW620, SKOV3, SK-UT, CaCo2, P388D1, SEM-K2, WEHI-231, HB56, TIB55, Jurkat, J45.01, LRMB, Bcl-1, BC-3, IC21, DLD2, Raw264.7, NRK, NRK-52E, MRC5, MEF, Hep G2, HeLa B, HeLa T4, COS, COS-1, COS-6, COS-M6A, BS-C-1 monkey kidney epithelial, BALB/3T3 mouse embryo fibroblast, 3T3 Swiss, 3T3-L1, 132-d5 human fetal fibroblasts; 10.1 mouse fibroblasts, 293-T, 3T3, 721, 9L, A2780, A2780ADR, A2780cis, A172, A20, A253, A431, A-549, ALC, AsPC-1, B16, B35, BCP-1 cells, BEAS-2B, bEnd.3, BHK-21, BR 293, BxPC3, C3H-10T1/2, C6/36, Cal-27, Capan-1, CHO, CHO-7, CHO-IR, CHO-K1, CHO-K2, CHO-S, CHO-T, CHO Dhfr −/−. COR-L23, COR-L23/CPR, COR-L23/5010, COR-L23/R23, COS-7, COV-434, CML T1, CMT, CT26, D17, DH82, DU145, DuCaP, EL4, EM2, EM3, EMT6/AR1, EMT6/AR10.0, FM3, H1299, H69, HAP1, HB54, HB55, HCA2, HEK-293, HeLa, Hepa1-6, Hep3B, Hepa1c1c7, HL-60, HMEC, HT-29, Jurkat, JY cells, K562 cells, Ku812, KCL22, KG1, KYO1, LNCap, Ma-Mel 1-48, MC-38, MCF-7, MCF-10A, MDA-MB-231, MDA-MB-468, MDA-MB-435, MDCK II, MDCK II, MOR/0.2R, MONO-MAC 6, MTD-1A, MyEnd, NCI-H69/CPR, NCI-H69/LX10, NCI-H69/LX20, NCI-H69/LX4, NIH-3T3, NALM-1, Neuro2A, NK92, NW-145, OPCN/OPCT cell lines, Peer, PNT-1A/PNT 2, RenCa, RIN-5F, RMA/RMAS, Saos-2 cells, Sf-9, SkBr3, T2, T-47D, T84, THP1 cell line, U373, U87, U937, VCaP, Vero cells, WM39, WT-49, X63, YAC-1, and YAR. Non-limiting examples of other cells that can be used with the disclosure include immune cells, such as CART, T-cells, B-cells, NK cells (including iNK cells), granulocytes, basophils, eosinophils, neutrophils, mast cells, monocytes, macrophages, dendritic cells, antigen-presenting cells (APC), or adaptive cells. Non-limiting examples of cells that can be used with this disclosure also include plant cells, such as parenchyma, sclerenchyma, collenchyma, xylem, phloem, germline (e.g., pollen). Cells may be from lycophytes, ferns, gymnosperms, angiosperms, bryophytes, charophytes, chloropytes, rhodophytes, or glaucophytes. Cells may be obtained from non-human animals, including, but not limited to, rats, dogs, rabbits, cats, and monkeys. Non-limiting examples of cells that can be used with this disclosure also include stem cells, such as human stem cells, animal stem cells, stem cells that are not derived from human embryonic stem cells, embryonic stem cells, mesenchymal stem cells, pluripotent stem cells, induced pluripotent stem cells (iPS), somatic stem cells, adult stem cells, hematopoietic stem cells, tissue-specific stem cells. Non-limiting examples of cells that can be used with this disclosure also include neuronal cells from various organs of an animal, e.g., brain, heart, lung, liver, pancreas, and muscle. In preferred embodiments, the cells that can be used with the disclosure are T cells, such as CAR-T (CART) cells.

[0276] CHO cells are an epithelial cell line which is particularly useful in biological and medical research. In particular, CHO cells are frequently used for the industrial production of recombinant therapeutics. In some embodiments, a CasΦ polypeptide disclosed herein is expressed in a CHO cell. In some embodiments, a CasΦ polypeptide disclosed herein complexed with a guide nucleic is expressed in a CHO cell. In some embodiments, a method disclosed herein comprises modifying or editing a CHO cell. In some embodiments, a modified CHO cell is provided wherein the CHO cell is modified by a CasΦ polypeptide disclosed herein. In some embodiments, a CHO cell is provided wherein the CHO cell comprises a CasΦ polypeptide disclosed herein.

[0277] T cells are important therapeutic targets. In some embodiments, a CasΦ polypeptide disclosed herein is expressed in a T cell. In some embodiments, a CasΦ polypeptide disclosed herein complexed with a guide nucleic is expressed in a T cell. In some embodiments, a method disclosed herein comprises modifying or editing a T cell. In some embodiments, a method disclosed herein comprises modifying a PDCD1 gene of a T cell. In some embodiments, a method disclosed herein comprises modifying a TRAC gene of a T cell. In some embodiments, a method disclosed herein comprises modifying a B2M gene of a T cell. In some embodiments, a method disclosed herein comprises modifying a PDCD1 gene of a T cell, a TRAC gene of a T cell, a B2M gene of a T cell or a combination thereof. In some embodiments, a method disclosed herein comprises modifying a PDCD1 gene, a TRAC gene, and a B2M gene of a T cell. In some embodiments, a modified T cell is provided wherein the T cell is modified by a CasΦ polypeptide disclosed herein. In some embodiments, a T cell is provided wherein the T cell comprises a CasΦ polypeptide disclosed herein.

[0278] T cells, also known as T lymphocytes, are easily identifiable by the surface expression of the T-cell receptor (TCR). In some embodiments, the T cells include one or more subsets of T cells, such as CD4+ cells, CD8+ cells, and sub-populations thereof. In some embodiments, a T cell is a CD4+ cell. In some embodiments, a T cell is a CD8+ T cells. In some embodiments, a population of T cells comprises CD4+ T cells and CD8+ T cells. In some embodiments, T cells comprise TCR-T, Tscm, or iT cells.

[0279] Sub-populations of CD4+ and CD8+ T cells include naive T cells, effector T cells, memory T cells, immature T cells, mature T cells, helper T cells, cytotoxic T cells, regulatory T cells, alpha/beta T cells, and delta/gamma T cells. Sub-types of memory T cells include stem cell memory T cells, central memory T cells, effector memory T cells, and terminally differentiated effector memory T cells. Sub-types of helper T cells, include T helper 1 cells, T helper 2 cells, T helper 3 cells, T helper 17 cells, T helper 9 cells, T helper 22 cells, and follicular helper T cells. In some embodiments, the cell is a regulatory T cell (Treg).

[0280] CART cells are T cells that have been genetically engineered to express unique chimeric antigen receptors (CARs) targeting specific antigens. CART cells are important targets for immunotherapy. In some embodiments, a CasΦ polypeptide disclosed herein is expressed in a CART cell. In some embodiments, a CasΦ polypeptide disclosed herein complexed with a guide nucleic is expressed in a CART cell. In some embodiments, a method disclosed herein comprises modifying or editing a CART cell. In some embodiments, a modified CART cell is provided wherein the CART cell is modified by a CasΦ polypeptide disclosed herein. In some embodiments, a CART cell is provided wherein the CART cell comprises a CasΦ polypeptide disclosed herein.

[0281] Modified stem cells and methods of modifying stem cells are also provided. In some embodiments, a CasΦ polypeptide disclosed herein is expressed in a stem cell. In some embodiments, a CasΦ polypeptide disclosed herein complexed with a guide nucleic is expressed in a stem cell. In some embodiments, a method disclosed herein comprises modifying or editing a stem cell. In some embodiments, a modified stem cell is provided wherein a stem cell is modified by a CasΦ polypeptide disclosed herein. In some embodiments, a stem cell is provided wherein the stem cell comprises a CasΦ polypeptide disclosed herein. In some embodiments, a modified stem cell is obtained or is obtainable by a method disclosed herein. In some embodiments, a modified stem cell is provided wherein the CART cell is modified by a CasΦ polypeptide disclosed herein.

[0282] Induced pluripotent stem cells (iPSCs) are pluripotent stem cells that are generated from somatic cells. They can propagate indefinitely and give rise to any cell type in the body. These features make iPSCs a powerful tool for researching human disease and provide a promising prospect for cell therapies for a range of medical conditions. iPSCs can be generated in a patient-specific manner and used in autologous transplant, thereby overcoming complications of rejection by the host immune system (Moradi et al. (2019), Stem Cell Research & Therapy).

[0283] In some embodiments, a CasΦ polypeptide disclosed herein is expressed in an induced pluripotent stem cell. In some embodiments, a CasΦ polypeptide disclosed herein complexed with a guide nucleic is expressed in an induced pluripotent stem cell. In some embodiments, a method disclosed herein comprises modifying or editing an induced pluripotent stem cell. In some embodiments, a modified induced pluripotent stem cell is provided wherein an induced pluripotent stem cell is modified by a CasΦ polypeptide disclosed herein. In some embodiments, an induced pluripotent stem cell is provided wherein the induced pluripotent stem cell comprises a CasΦ polypeptide disclosed herein. In some embodiments, a modified induced pluripotent cell is obtained or is obtainable by a method disclosed herein.

[0284] Hematopoietic stem cells (HSCs) are identifiable by the marker CD34. HSCs are stem cells that differentiate to give rise blood cells, such as T and B lymphocytes, erythrocytes, monocytes and macrophages. HSCs are important cells for future stem cell therapies as they have the potential to be used to treat genetic blood cell diseases (Morgan et al. (2017), Cell Stem Cell).

[0285] In some embodiments, a CasΦ polypeptide disclosed herein is expressed in a hematopoietic stem cell. In some embodiments, a CasΦ polypeptide disclosed herein complexed with a guide nucleic is expressed in a hematopoietic stem cell. In some embodiments, a method disclosed herein comprises modifying or editing a hematopoietic stem cell. In some embodiments, a modified hematopoietic stem cell is provided wherein a hematopoietic stem cell is modified by a CasΦ polypeptide disclosed herein. In some embodiments, a hematopoietic stem cell is provided wherein the hematopoietic stem cell comprises a CasΦ polypeptide disclosed herein. In some embodiments, a modified hematopoietic stem cell is obtained or is obtainable by a method disclosed herein.

[0286] Compositions and methods of the disclosure can be used for agricultural engineering. For example, compositions and methods of the disclosure can be used to confer desired traits on a plant. A plant can be engineered for the desired physiological and agronomic characteristic using the present disclosure. In some embodiments, the target nucleic acid sequence comprises a nucleic acid sequence of a plant. In some embodiments, the target nucleic acid sequence comprises a genomic nucleic acid sequence of a plant cell. In some embodiments, the target nucleic acid sequence comprises a nucleic acid sequence of an organelle of a plant cell. In some embodiments, the target nucleic acid sequence comprises a nucleic acid sequence of a chloroplast of a plant cell.

[0287] The plant can be a monocotyledonous plant. The plant can be a dicotyledonous plant. Non-limiting examples of orders of dicotyledonous plants include Magniolales, Illiciales, Laurales, Piperales, Aristochiales, Nymphaeales, Ranunculales, Papeverales, Sarraceniaceae, Trochodendrales, Hamamelidales, Eucomiales, Leitneriales, Myricales, Fagales, Casuarinales, Caryophyllales, Batales, Polygonales, Plumbaginales, Dilleniales, Theales, Malvales, Urticales, Lecythidales, Violales, Salicales, Capparales, Ericales, Diapensales, Ebenales, Primulales, Rosales, Fabales, Podostemales, Haloragales, Myrtales, Cornales, Proteales, San tales, Rafflesiales, Celastrales, Euphorbiales, Rhamnales, Sapindales, Juglandales, Geraniales, Polygalales, Umbellales, Gentianales, Polemoniales, Lamiales, Plantaginales, Scrophulariales, Campanulales, Rubiales, Dipsacales, and Asterales.

[0288] Non-limiting examples of orders of monocotyledonous plants include Alismatales, Hydrocharitales, Najadales, Triuridales, Commelinales, Eriocaulales, Restionales, Poales, Juncales, Cyperales, Typhales, Bromeliales, Zingiberales, Arecales, Cyclanthales, Pandanales, Arales, Lilliales, and Orchid ales. A plant can belong to the order, for example, Gymnospermae, Pinales, Ginkgoales, Cycadales, Araucariales, Cupressales and Gnetales.

[0289] Non-limiting examples of plants include plant crops, fruits, vegetables, grains, soy bean, corn, maize, wheat, seeds, tomatoes, rice, cassava, sugarcane, pumpkin, hay, potatoes, cotton, cannabis, tobacco, flowering plants, conifers, gymnosperms, ferns, clubmosses, hornworts, liverworts, mosses, wheat, maize, rice, millet, barley, tomato, apple, pear, strawberry, orange, acacia, carrot, potato, sugar beets, yam, lettuce, spinach, sunflower, rape seed, Arabidopsis, alfalfa, amaranth, apple, apricot, artichoke, ash tree, asparagus, avocado, banana, barley, beans, beet, birch, beech, blackberry, blueberry, broccoli, Brussel's sprouts, cabbage, canola, cantaloupe, carrot, cassava, cauliflower, cedar, a cereal, celery, chestnut, cherry, Chinese cabbage, citrus, clementine, clover, coffee, corn, cotton, cowpea, cucumber, cypress, eggplant, elm, endive, eucalyptus, fennel, figs, fir, geranium, grape, grapefruit, groundnuts, ground cherry, gum hemlock, hickory, kale, kiwifruit, kohlrabi, larch, lettuce, leek, lemon, lime, locust, pine, maidenhair, maize, mango, maple, melon, millet, mushroom, mustard, nuts, oak, oats, oil palm, okra, onion, orange, an ornamental plant or flower or tree, papaya, palm, parsley, parsnip, pea, peach, peanut, pear, peat, pepper, persimmon, pigeon pea, pine, pineapple, plantain, plum, pomegranate, potato, pumpkin, radicchio, radish, rapeseed, raspberry, rice, rye, sorghum, safflower, sallow, soybean, spinach, spruce, squash, strawberry, sugar beet, sugarcane, sunflower, sweet potato, sweet corn, tangerine, tea, tobacco, tomato, trees, triticale, turf grasses, turnips, vine, walnut, watercress, watermelon, wheat, yams, yew, and zucchini. A plant can include algae.

[0290] In some embodiments, the target nucleic acid sequence comprises a nucleic acid sequence of a virus, a bacterium, or other pathogen responsible for a disease in a plant (e.g., a crop). Methods and compositions of the disclosure can be used to treat or detect a disease in a plant. For example, the methods of the disclosure can be used to target a viral nucleic acid sequence in a plant. A programmable nuclease of the disclosure (e.g., CasΦ) can cleave the viral nucleic acid. In some embodiments, the target nucleic acid sequence comprises a nucleic acid sequence of a virus or a bacterium or other agents (e.g., any pathogen) responsible for a disease in the plant (e.g., a crop). In some embodiments, the target nucleic acid comprises DNA that is reverse transcribed from RNA using a reverse transcriptase prior to detection by a programmable nuclease using the compositions, systems, and methods disclosed herein. The target nucleic acid, in some cases, is a portion of a nucleic acid from a virus or a bacterium or other agents responsible for a disease in the plant (e.g., a crop). In some cases, the target nucleic acid is a portion of a nucleic acid from a genomic locus, or any DNA amplicon, such as a reverse transcribed mRNA or a cDNA from a gene locus, a transcribed mRNA, or a reverse transcribed cDNA from a gene locus in at a virus or a bacterium or other agents (e.g., any pathogen) responsible for a disease in the plant (e.g., a crop). A virus infecting the plant can be an RNA virus. A virus infecting the plant can be a DNA virus. Non-limiting examples of viruses that can be targeted with the disclosure include Tobacco mosaic virus (TMV), Tomato spotted wilt virus (TSWV), Cucumber mosaic virus (CMV), Potato virus Y (PVY), Cauliflower mosaic virus (CaMV) (RT virus), Plum pox virus (PPV), Brome mosaic virus (BMV) and Potato virus X (PVX).

[0291] The sample used for cancer testing may comprise at least one target nucleic acid that can bind to a guide nucleic acid of the reagents described herein. The target nucleic acid, in some cases, comprises a portion of a gene comprising a mutation associated with cancer, a gene whose overexpression is associated with cancer, a tumor suppressor gene, an oncogene, a checkpoint inhibitor gene, a gene associated with cellular growth, a gene associated with cellular metabolism, or a gene associated with cell cycle. Sometimes, the target nucleic acid encodes a cancer biomarker, such as a prostate cancer biomarker or non-small cell lung cancer. In some cases, the assay can be used to detect “hotspots” in target nucleic acids that can be predictive of lung cancer. In some cases, the target nucleic acid comprises a portion of a nucleic acid that is associated with a blood fever. In some cases, the target nucleic acid is a portion of a nucleic acid from a genomic locus, any DNA amplicon of, a reverse transcribed mRNA, or a cDNA from a locus of at least one of: ALK, APC, ATM, AXIN2, BAP1, BARD1, BLM, BMPR1A, BRCA1, BRCA2, BRIP1, CASR, CDC73, CDH1, CDK4, CDKN1B, CDKN1C, CDKN2A, CEBPA, CHEK2, CTNNA1, DICER1, DIS3L2, EGFR, EPCAM, FH, FLCN, GATA2, GPC3, GREM1, HOXB13, HRAS, KIT, MAX, MEN1, MET, MITF, MLH1, MSH2, MSH3, MSH6, MUTYH, NBN, NF1, NF2, NTHL1, PALB2, PDGFRA, PHOX2B, PMS2, POLD1, POLE, POT1, PRKAR1A, PTCH1, PTEN, RAD50, RAD51C, RAD51D, RB1, RECQL4, RET, RUNX1, SDHA, SDHAF2, SDHB, SDHC, SDHD, SMAD4, SMARCA4, SMARCB1, SMARCE1, STK11, SUFU, TERC, TERT, TMEM127, TP53, TSC1, TSC2, VHL, WRN, and WT1. Any region of the aforementioned gene loci can be probed for a mutation or deletion using the compositions and methods disclosed herein. For example, in the EGFR gene locus, the compositions and methods for detection disclosed herein can be used to detect a single nucleotide polymorphism or a deletion. The SNP or deletion can occur in a non-coding region or a coding region. The SNP or deletion can occur in an Exon, such as Exon19. A SNP, deletion, or other mutation may mediate gene knockout.

[0292] The sample used for genetic disorder testing may comprise at least one target nucleic acid that can bind to a guide nucleic acid of the reagents described herein. In some embodiments, the genetic disorder is hemophilia, sickle cell anemia, 0-thalassemia, Duchene muscular dystrophy, severe combined immunodeficiency, Huntington's disease, or cystic fibrosis. The target nucleic acid, in some cases, is from a gene with a mutation associated with a genetic disorder, from a gene whose overexpression is associated with a genetic disorder, from a gene associated with abnormal cellular growth resulting in a genetic disorder, or from a gene associated with abnormal cellular metabolism resulting in a genetic disorder. In some cases, the target nucleic acid is a nucleic acid from a genomic locus, a transcribed mRNA, or a reverse transcribed mRNA, a DNA amplicon of or a cDNA from a locus of at least one of: CFTR, FMR1, SMN1, ABCB11, ABCC8, ABCD1, ACAD9, ACADM, ACADVL, ACAT1, ACOX1, ACSF3, ADA, ADAMTS2, ADGRG1, AGA, AGL, AGPS, AGXT, AIRE, ALDH3A2, ALDOB, ALG6, ALMS1, ALPL, AMT, AQP2, ARG1, ARSA, ARSB, ASL, ASNS, ASPA, ASS1, ATM, ATP6V1B1, ATP7A, ATP7B, ATRX, BBS1, BBS10, BBS12, BBS2, BCKDHA, BCKDHB, BCS1L, BLM, BSND, CAPN3, CBS, CDH23, CEP290, CERKL, CHM, CHRNE, CIITA, CLN3, CLN5, CLN6, CLN8, CLRN1, CNGB3, COL27A1, COL4A3, COL4A4, COL4A5, COL7A1, CPS1, CPT1A, CPT2, CRB1, CTNS, CTSK, CYBA, CYBB, CYP11B1, CYP11B2, CYP17A1, CYP19A1, CYP27A1, DBT, DCLRElC, DHCR7, DHDDS, DLD, DMD, DNAH5, DNAI1, DNAI2, DYSF, EDA, EIF2B5, EMD, ERCC6, ERCC8, ESCO2, ETFA, ETFDH, ETHEl, EVC, EVC2, EYS, F9, FAH, FAM161A, FANCA, FANCC, FANCG, FH, FKRP, FKTN, G6PC, GAA, GALC, GALK1, GALT, GAMT, GBA, GBE1, GCDH, GFM1, GJB1, GJB2, GLA, GLB1, GLDC, GLE1, GNE, GNPTAB, GNPTG, GNS, GRHPR, HADHA, HAX1, HBA1, HBA2, HBB, HEXA, HEXB, HGSNAT, HLCS, HMGCL, HOGA1, HPS1, HPS3, HSD17B4, HSD3B2, HYAL1, HYLS1, IDS, IDUA, IKBKAP, IL2RG, IVD, KCNJ11, LAMA2, LAMA3, LAMB3, LAMC2, LCA5, LDLR, LDLRAP1, LHX3, LIFR, LIPA, LOXHD1, LPL, LRPPRC, MAN2B1, MCOLN1, MED17, MESP2, MFSD8, MKS1, MLC1, MMAA, MMAB, MMACHC, MMADHC, MPI, MPL, MPV17, MTHFR, MTM1, MTRR, MTTP, MUT, MYO7A, NAGLU, NAGS, NBN, NDRG1, NDUFAF5, NDUFS6, NEB, NPC1, NPC2, NPHS1, NPHS2, NR2E3, NTRK1, OAT, OPA3, OTC, PAH, PC, PCCA, PCCB, PCDH15, PDHA1, PDHB, PEX1, PEX10, PEX12, PEX2, PEX6, PEX7, PFKM, PHGDH, PKHD1, PMM2, POMGNT1, PPT1, PROP1, PRPS1, PSAP, PTS, PUS1, PYGM, RAB23, RAG2, RAPSN, RARS2, RDH12, RMRP, RPE65, RPGRIP1L, RS1, RTEL1, SACS, SAMID1, SEPSECS, SGCA, SGCB, SGCG, SGSH, SLC12A3, SLC12A6, SLC17A5, SLC22A5, SLC25A13, SLC25A15, SLC26A2, SLC26A4, SLC35A3, SLC37A4, SLC39A4, SLC4A11, SLC6A8, SLC7A7, SMARCAL1, SMPD1, STAR, SUMF1, TAT, TCIRG1, TECPR2, TFR2, TGM1, TH, TMEM216, TPP1, TRMU, TSFM, TTPA, TYMP, USH1C, USH2A, VPS13A, VPS13B, VPS45, VRK1, VSX2, WNT10A, XPA, XPC, and ZFYVE26.

[0293] The sample used for phenotyping testing may comprise at least one target nucleic acid that can bind to a guide nucleic acid of the reagents described herein. The target nucleic acid, in some cases, is a nucleic acid encoding a sequence associated with a phenotypic trait.

[0294] The sample used for genotyping testing may comprise at least one target nucleic acid that can bind to a guide nucleic acid of the reagents described herein. The target nucleic acid, in some cases, is a nucleic acid encoding a sequence associated with a genotype of interest.

[0295] The sample used for ancestral testing may comprise at least one target nucleic acid that can bind to a guide nucleic acid of the reagents described herein. The target nucleic acid, in some cases, is a nucleic acid encoding a sequence associated with a geographic region of origin or ethnic group.

[0296] The sample can be used for identifying a disease status. For example, a sample is any sample described herein, and is obtained from a subject for use in identifying a disease status of a subject. The disease can be a cancer or genetic disorder. Sometimes, a method comprises obtaining a serum sample from a subject; and identifying a disease status of the subject. Often, the disease status is prostate disease status, but the status of any disease can be assessed.

[0297] In some instances, the target nucleic acid is a single stranded nucleic acid. Alternatively, or in combination, the target nucleic acid is a double stranded nucleic acid and is prepared into single stranded nucleic acids before or upon contacting the reagents. The target nucleic acid may be a reverse transcribed RNA, DNA, DNA amplicon, synthetic nucleic acids, or nucleic acids found in biological or environmental samples. The target nucleic acids include but are not limited to mRNA, rRNA, tRNA, non-coding RNA, long non-coding RNA, and microRNA (miRNA). In some cases, the target nucleic acid is single-stranded DNA (ssDNA) or mRNA. In some cases, the target nucleic acid is from a virus, a parasite, or a bacterium described herein. In some cases, the target nucleic acid is transcribed from a gene as described herein and then reverse transcribed into a DNA amplicon. In some cases, miRNA is extracted using a mirVANA kit. In some cases, RNA may be treated with shrimp alkaline phosphatase to remove phosphates from the 5′ and 3′ ends of an RNA for analysis. RNA analysis may further comprise the use of a thermocycler, SR Adaptors for Illumina, ligation enzymes, reverse transcriptase, and suitable primers for polymerase chain reaction.

[0298] A number of target nucleic acids are consistent with the methods and compositions disclosed herein. Some methods described herein can detect a target nucleic acid present in the sample in various concentrations or amounts as a target nucleic acid population. In some cases, the sample has at least 2 target nucleic acids. In some cases, the sample has at least 3, 5, 10, 20, 30, 40, 50, 100, 200, 300, 400, 500, 600, 700, 800, 900, 1000, 2000, 3000, 4000, 5000, 6000, 7000, 8000, 9000, or 10000 target nucleic acids. In some cases, the sample as from 1 to 10,000, from 100 to 8000, from 400 to 6000, from 500 to 5000, from 1000 to 4000, or from 2000 to 3000 target nucleic acids. In some cases, the method detects target nucleic acid present at least at one copy per 10 non-target nucleic acids, 10² non-target nucleic acids, 10³ non-target nucleic acids, 10⁴ non-target nucleic acids, 10⁵ non-target nucleic acids, 10⁶ non-target nucleic acids, 10⁷ non-target nucleic acids, 10⁸ non-target nucleic acids, 10⁹ non-target nucleic acids, or 10¹⁰ non-target nucleic acids. Often, the target nucleic acid can be from 0.05% to 20% of total nucleic acids in the sample. Sometimes, the target nucleic acid is from 0.1% to 10% of the total nucleic acids in the sample. The target nucleic acid, in some cases, is from 0.1% to 5% of the total nucleic acids in the sample. The target nucleic acid can also be from 0.1% to 1% of the total nucleic acids in the sample. The target nucleic acid can be DNA or RNA. The target nucleic acid can be any amount less than 100% of the total nucleic acids in the sample. The target nucleic acid can be 100% of the total nucleic acids in the sample.

[0299] In some embodiments, the sample comprises a target nucleic acid at a concentration of less than 1 nM, less than 2 nM, less than 3 nM, less than 4 nM, less than 5 nM, less than 6 nM, less than 7 nM, less than 8 nM, less than 9 nM, less than 10 nM, less than 20 nM, less than 30 nM, less than 40 nM, less than 50 nM, less than 60 nM, less than 70 nM, less than 80 nM, less than 90 nM, less than 100 nM, less than 200 nM, less than 300 nM, less than 400 nM, less than 500 nM, less than 600 nM, less than 700 nM, less than 800 nM, less than 900 nM, less than 1 μM, less than 2 μM, less than 3 μM, less than 4 μM, less than 5 μM, less than 6 μM, less than 7 μM, less than 8 μM, less than 9 μM, less than 10 μM, less than 100 μM, or less than 1 mM. In some embodiments, the sample comprises a target nucleic acid sequence at a concentration of from 1 nM to 2 nM, from 2 nM to 3 nM, from 3 nM to 4 nM, from 4 nM to 5 nM, from 5 nM to 6 nM, from 6 nM to 7 nM, from 7 nM to 8 nM, from 8 nM to 9 nM, from 9 nM to 10 nM, from 10 nM to 20 nM, from 20 nM to 30 nM, from 30 nM to 40 nM, from 40 nM to 50 nM, from 50 nM to 60 nM, from 60 nM to 70 nM, from 70 nM to 80 nM, from 80 nM to 90 nM, from 90 nM to 100 nM, from 100 nM to 200 nM, from 200 nM to 300 nM, from 300 nM to 400 nM, from 400 nM to 500 nM, from 500 nM to 600 nM, from 600 nM to 700 nM, from 700 nM to 800 nM, from 800 nM to 900 nM, from 900 nM to 1 μM, from 1 μM to 2 μM, from 2 μM to 3 μM, from 3 μM to 4 μM, from 4 μM to 5 μM, from 5 μM to 6 μM, from 6 μM to 7 μM, from 7 μM to 8 μM, from 8 μM to 9 μM, from 9 μM to 10 μM, from 10 μM to 100 μM, from 100 μM to 1 mM, from 1 nM to 10 nM, from 1 nM to 100 nM, from 1 nM to 1 μM, from 1 nM to 10 μM, from 1 nM to 100 μM, from 1 nM to 1 mM, from 10 nM to 100 nM, from 10 nM to 1 μM, from 10 nM to 10 μM, from 10 nM to 100 μM, from 10 nM to 1 mM, from 100 nM to 1 μM, from 100 nM to 10 μM, from 100 nM to 100 μM, from 100 nM to 1 mM, from 1 μM to 10 μM, from 1 μM to 100 μM, from 1 μM to 1 mM, from 10 μM to 100 μM, from 10 μM to 1 mM, or from 100 μM to 1 mM. In some embodiments, the sample comprises a target nucleic acid at a concentration of from 20 nM to 200 μM, from 50 nM to 100 μM, from 200 nM to 50 μM, from 500 nM to 20 μM, or from 2 μM to 10 μM. In some embodiments, the target nucleic acid is not present in the sample.

[0300] In some embodiments, the sample comprises fewer than 10 copies, fewer than 100 copies, fewer than 1000 copies, fewer than 10,000 copies, fewer than 100,000 copies, or fewer than 1,000,000 copies of a target nucleic acid sequence. In some embodiments, the sample comprises from 10 copies to 100 copies, from 100 copies to 1000 copies, from 1000 copies to 10,000 copies, from 10,000 copies to 100,000 copies, from 100,000 copies to 1,000,000 copies, from 10 copies to 1000 copies, from 10 copies to 10,000 copies, from 10 copies to 100,000 copies, from 10 copies to 1,000,000 copies, from 100 copies to 10,000 copies, from 100 copies to 100,000 copies, from 100 copies to 1,000,000 copies, from 1,000 copies to 100,000 copies, or from 1,000 copies to 1,000,000 copies of a target nucleic acid sequence. In some embodiments, the sample comprises from 10 copies to 500,000 copies, from 200 copies to 200,000 copies, from 500 copies to 100,000 copies, from 1000 copies to 50,000 copies, from 2000 copies to 20,000 copies, from 3000 copies to 10,000 copies, or from 4000 copies to 8000 copies. In some embodiments, the target nucleic acid is not present in the sample.

[0301] A number of target nucleic acid populations are consistent with the methods and compositions disclosed herein. Some methods described herein can detect two or more target nucleic acid populations present in the sample in various concentrations or amounts. In some cases, the sample has at least 2 target nucleic acid populations. In some cases, the sample has at least 3, 4, 5, 6, 7, 8, 9, 10, 20, 30, 40, or 50 target nucleic acid populations. In some cases, the sample has from 3 to 50, from 5 to 40, or from 10 to 25 target nucleic acid populations. In some cases, the method detects target nucleic acid populations that are present at least at one copy per 10¹ non-target nucleic acids, 10² non-target nucleic acids, 10³ non-target nucleic acids, 10⁴ non-target nucleic acids, 10⁵ non-target nucleic acids, 10⁶ non-target nucleic acids, 10⁷ non-target nucleic acids, 10⁸ non-target nucleic acids, 10⁹ non-target nucleic acids, or 10¹⁰ non-target nucleic acids. The target nucleic acid populations can be present at different concentrations or amounts in the sample.

[0302] In some embodiments, the target nucleic acid as disclosed herein can activate the programmable nuclease to initiate sequence-independent cleavage of a nucleic acid-based reporter (e.g., a reporter comprising a DNA sequence, a reporter comprising an RNA sequence, or a reporter comprising DNA and RNA). For example, a programmable nuclease of the present disclosure is activated by a target DNA to cleave reporters having an RNA (also referred to herein as an “RNA reporter”). Alternatively, a programmable nuclease of the present disclosure is activated by a target RNA to cleave reporters having an RNA. Alternatively, a programmable nuclease of the present disclosure is activated by a target DNA to cleave reporters having a DNA (also referred to herein as a “DNA reporter”). The RNA reporter can comprise a single-stranded RNA labelled with a detection moiety or can be any RNA reporter as disclosed herein. The DNA reporter can comprise a single-stranded DNA labelled with a detection moiety or can be any DNA reporter as disclosed herein.

[0303] In some embodiments, the target nucleic acid as described in the methods herein does not initially comprise a PAM sequence. However, any target nucleic acid of interest may be generated using the methods described herein to comprise a PAM sequence, and thus be a PAM target nucleic acid. A PAM target nucleic acid, as used herein, refers to a target nucleic acid that has been amplified to insert a PAM sequence that is recognized by a CRISPR/Cas system.

[0304] In some embodiments, the target nucleic acid is in a cell. In some embodiments, the cell is a single-cell eukaryotic organism; a plant cell an algal cell; a fungal cell; an animal cell; a cell from an invertebrate animal; a cell from a vertebrate animal such as fish, amphibian, reptile, bird, and mammal; or a cell from a mammal such as a human, a non-human primate, an ungulate, a feline, a bovine, an ovine, and a caprine. In preferred embodiments, the cell is a eukaryotic cell. In preferred embodiments, the cell is a mammalian cell, a human cell, or a plant cell.

[0305] Any of the above disclosed samples are consistent with the methods, compositions, reagents, enzymes, and kits disclosed herein and can be used as a companion diagnostic with any of the diseases disclosed herein, or can be used in reagent kits, point-of-care diagnostics, or over-the-counter diagnostics.

### Methods of Modifying or Editing a Target Nucleic Acid Sequence

[0306] The disclosure provides compositions and methods for modifying or editing a target nucleic acid sequence. In some embodiments, the target nucleic acid sequence is associated with (e.g., causes, at least in part) a disease or disorder described herein, including a liver disease or disorder, an eye disease or disorder, cystic fibrosis, or a muscle disease or disorder. In some examples, the target nucleic acid comprises at least a portion of any one of the following genes: DNMT1, HPRT1, RPL32P3, CCR5, FANCF, GRIN2B, EMX1, AAVS1, ALKBH5, CLTA, CDK11, CTNNB1, AXIN1, LRP6, TBK1, BAP1, TLE3, PPM1A, BCL2L2, SUFU, RICTOR, VPS35, TOP1, SIRT1, PTEN, MMD, PAQR8, H2AX, POU5F1, OCT4, SYS1, ARFRP1, TSPAN14, EMC2, EMC3, SEL1L, DERL2, UBE2G2, UBE2J1, HRD1, PCSK9, BAK1 and CFTR. In some embodiments, the target nucleic acid comprises at least a portion of a PCSK9 gene. In some embodiments, the PCSK9 gene comprises a mutation associated with a liver disease or disorder. In some embodiments, the target nucleic acid comprises at least a portion of a BAK1 gene. In some embodiments, the BAK1 gene comprises a mutation associated with an eye disease or disorder. In some embodiments, the target nucleic acid comprises at least a portion of a CFTR gene. In some embodiments, the CFTR gene comprises a mutation associated with cystic fibrosis. In some embodiments, the CFTR gene comprises a delta F508 mutation. Compositions and methods of the disclosure can be used for introducing a site-specific cleavage in a target nucleic acid sequence. The site-specific cleavage can be a double-strand cleavage. The site-specific cleavage can be a single-strand cleavage (e.g. nicking). The modification can result in introducing a mutation (e.g., point mutations, deletions) in a target nucleic acid. The modification can result in removing a disease-causing mutation in a nucleic acid sequence. Methods of the disclosure can be targeted to any locus in a genome of a cell. They can generate point mutations, deletions, null mutations, or tissue-specific mutations in a target nucleic acid sequence. A complex comprising a programmable nuclease and guide nucleic acid of the disclosure can be used to generate gene knock-out, gene knock-in, gene editing, gene tagging, or a combination thereof. In some embodiments, the activity of a nuclease, such as a cleavage product, may be analyzed using gel electrophoresis or nucleic acid sequencing.

[0307] The methods described herein (e.g., methods of introducing a nick or a double-stranded break into a target nucleic acid) may be used to edit or modify a target nucleic acid. Methods of modifying a target nucleic acid may use the compositions comprising a programmable nuclease and a gRNA as described herein. Modifying a target nucleic acid may comprise one or more of cleaving the target nucleic acid, deleting one or more nucleotides of the target nucleic acid, inserting one or more nucleotides into the target nucleic acid, mutating one or more nucleotides of the target nucleic acid, or modifying (e.g., methylating, demethylating, deaminating, or oxidizing) of one or more nucleotides of the target nucleic acid.

[0308] In some embodiments, modifying a target nucleic acid comprises genome editing. Genome editing may comprise modifying a genome, chromosome, plasmid, or other genetic material of a cell or organism. In some embodiments the genome, chromosome, plasmid, or other genetic material of the cell or organism is modified in vivo. In some embodiments the genome, chromosome, plasmid, or other genetic material of the cell or organism is modified in a cell. In some embodiments the genome, chromosome, plasmid, or other genetic material of the cell or organism is modified in vitro. For example, a plasmid may be modified in vitro using a composition described herein and introduced into a cell or organism. In some embodiments, modifying a target nucleic acid may comprise deleting a sequence from a target nucleic acid. For example, a mutated sequence or a sequence associated with a disease may be removed from a target nucleic acid. In some embodiments, modifying a target nucleic acid may comprise replacing a sequence in a target nucleic acid with a second sequence. For example, a mutated sequence or a sequence associated with a disease may be replaced with a second sequence lacking the mutation or that is not associated with the disease. In some embodiments, modifying a target nucleic acid may comprise introducing a sequence into a target nucleic acid. For example, a beneficial sequence or a sequence that may reduce or eliminate a disease may inserted into the target nucleic acid.

[0309] In some embodiments, the present disclosure provides methods and compositions for editing a target nucleic acid sequence comprising a programmable nuclease capable of introducing a double-strand break in a double stranded DNA (dsDNA) target sequence. The programmable nuclease can be coupled to a guide nucleic acid that targets a particular region of interest in the dsDNA. A double-strand break can be repaired and rejoined by non-homologous end joining (NHEJ) or homology directed repair (HDR). Thus, a programmable nuclease capable of introducing a double-strand break as disclosed herein can be useful in a genome editing method, for example, used for therapeutic applications to treat a disease or disorder, or for agricultural applications. Such diseases or disorders that can be treated by the methods and compositions described herein include a liver disease or disorder, an eye disease or disorder, cystic fibrosis, or a muscle disease or disorder. CasΦ programmable nuclease disclosed herein can be used for genome editing purposes to generate double strand breaks in order to excise a region of DNA and subsequently introduce a region of DNA (e.g., donor DNA) into the excised region.

[0310] In some embodiments, the present disclosure provides methods and compositions for modifying or editing a target nucleic acid sequence comprising two or more programmable nickases. For example, modifying a target nucleic acid may comprise introducing a two or more single-stranded breaks in the target nucleic acid. In some embodiments, a break may be introduced by contacting a target nucleic acid with a programmable nickase and a guide nucleic acid. The guide nucleic acid may bind to the programmable nickase and hybridize to a region of the target nucleic acid, thereby recruiting the programmable nickase to the region of the target nucleic acid. Binding of the programmable nickase to the guide nucleic acid and the region of the target nucleic acid may activate the programmable nickase, and the programmable nickase may introduce a break (e.g., a single stranded break) in the region of the target nucleic acid. In some embodiments, modifying a target nucleic acid may comprise introducing a first break in a first region of the target nucleic acid and a second break in a second region of the target nucleic acid. For example, modifying a target nucleic acid may comprise contacting a target nucleic acid with a first guide nucleic acid that binds to a first programmable nickase and hybridizes to a first region of the target nucleic acid and a second guide nucleic acid that binds to a second programmable nickase and hybridizes to a second region of the target nucleic acid. The first programmable nickase may introduce a first break in a first strand at the first region of the target nucleic acid, and the second programmable nickase may introduce a second break in a second strand at the second region of the target nucleic acid. In some embodiments, a segment of the target nucleic acid between the first break and the second break may be removed, thereby modifying the target nucleic acid. In some embodiments, a segment of the target nucleic acid between the first break and the second break may be replaced (e.g., with an insert sequence), thereby modifying the target nucleic acid.

[0311] The methods of the disclosure can use HDR or NHEJ. Following cleavage of a targeted genomic sequence, one of two alternative DNA repair mechanisms can restore chromosomal integrity: non-homologous end joining (NHEJ) which can generate insertions and/or deletions of a few base-pairs of DNA at the cut site. Alternatively, the cell can employ homology-directed repair (HDR), which can correct the lesion via an additional DNA template (e.g., donor) that spans the cut site. In some instances, the methods of the disclosure use microhomology-mediated end-joining (MMEJ).

[0312] Methods and compositions of the disclosure can be used to insert a donor polynucleotide into a target nucleic acid sequence. A donor polynucleotide can comprise a segment of nucleic acid to be integrated at a target genomic locus. The donor polynucleotide can comprise one or more polynucleotides of interest. The donor polynucleotide can comprise one or more expression cassettes. The expression cassette can comprise a donor polynucleotide of interest, a polynucleotide encoding a selection marker and/or a reporter gene, and regulatory components that influence expression.

[0313] The donor polynucleotide can comprise a genomic nucleic acid. The genomic nucleic acid can be derived from an animal, a mouse, a human, a non-human, a rodent, a non-human, a rat, a hamster, a rabbit, a pig, a bovine, a deer, a sheep, a goat, a chicken, a cat, a dog, a ferret, a primate (e.g., marmoset, rhesus monkey), domesticated mammal or an agricultural mammal, an avian, a bacterium, a archaeon, a virus, or any other organism of interest or a combination thereof. The donor polynucleotide may be synthetic.

[0314] Donor polynucleotides of any suitable size can be integrated into a genome. In some embodiments, the donor polynucleotide integrated into a genome is less than 3, about 3, 3.5, 4, 4.5, 5, 5.5, 6, 6.5, 7, 7.5, 8, 8.5, 9, 9.5, 10, 10.5, 11, 11.5, 12, 12.5, 13, 13.5, 14, 14.5, 15, 16, 17, 18, 19, 20, 25, 30, 35, 40, 45, 50, 100, 150, 200, 250, 300, 350, 400, 450, 500 or more than 500 kilobases (kb) in length. In some embodiments, the donor polynucleotide integrated into a genome is at least about 2, 2.5, 3, 3.5, 4, 4.5, 5, 5.5, 6, 6.5, 7, 7.5, 8, 8.5, 9, 9.5, 10, 10.5, 11, 11.5, 12, 12.5, 13, 13.5, 14, 14.5, 15, 16, 17, 18, 19, 20, 25, 30, 35, 40, 45, 50, 100, 150, 200, 250, 300, 350, 400, 450, 500 or more than 500 kb in length. In some embodiments, the donor polynucleotide integrated into a genome is up to about 3, 3.5, 4, 4.5, 5, 5.5, 6, 6.5, 7, 7.5, 8, 8.5, 9, 9.5, 10, 10.5, 11, 11.5, 12, 12.5, 13, 13.5, 14, 14.5, 15, 16, 17, 18, 19, 20, 25, 30, 35, 40, 45, 50, 100, 150, 200, 250, 300, 350, 400, 450, 500 or more than 500 kb in length.

[0315] The donor polynucleotide can be flanked by site-specific recombination target sequences (e.g., 5′ and 3′ homology arms) on a targeting vector. The length of a homology arm may be from about 50 to about 1000 bp. The length of a homology arm may be from about 400 to about 1000 bp. A homology arm can be of any length that is sufficient to promote a homologous recombination event with a corresponding target site, including for example, from about 400 bp to about 500 bp, from about 500 bp to about 600 bp, from about 600 bp to about 700 bp, from about 700 bp to about 800 bp, from about 800 bp to about 900 bp, or from about 900 bp to about 1000 bp. In preferred embodiments, the length of a homology arm may be from about 200 to about 300 bp. The sum total of 5′ and 3′ homology arms can be about 0.5 kb, 1 kb, 1.5 kb, 2 kb, 3 kb, 4 kb, 5 kb, 6 kb, 7 kb, 8 kb, 9 kb, about 0.5 kb to about 1 kb, about 1 kb to about 1.5 kb, about 1.5 kb to about 2 kb, about 2 kb to about 3 kb, about 3 kb to about 4 kb, about 4 kb to about 5 kb, about 5 kb to about 6 kb, about 6 kb to about 7 kb, about 8 kb to about 9 kb, or is at least 10 kb.

[0316] In some embodiments, the donor polynucleotide comprises one or more phosphorothioate bonds between nucleobases. In some embodiments, one or more of the first five 5′ nucleobases of the donor polynucleotide are linked by phosphorothioate bonds. In some embodiments, one or more of the five nucleobases at the 3′ end of the donor polynucleotide are linked by phosphorothioate bonds. In some embodiments, one or more of the first three 5′ nucleobases of the donor polynucleotide are linked by phosphorothioate bonds. In some embodiments, one or more of the three nucleobases at the 3′ end of the donor polynucleotide are linked by phosphorothioate bonds. In preferred embodiments, the two nucleobases at 5′ end of the donor polynucleotide are linked by a phosphorothioate bond. In some embodiments, the two nucleobases at the 3′ end of the donor polynucleotide are linked by a phosphorothioate bond. In more preferred embodiments, the two nucleobases at 5′ end of the donor polynucleotide are linked by a phosphorothioate bond and the two nucleobases at the 3′ end of the donor polynucleotide are linked by a phosphorothioate bond.

[0317] Examples of site-specific recombinases that can be used include, but are not limited to, Cre, Flp, and Dre recombinases. The site-specific recombinase can be introduced into the cell by any means, including by introducing the recombinase polypeptide into the cell or by introducing a polynucleotide encoding the site-specific recombinase into the host cell. The polynucleotide encoding the site-specific recombinase can be located within the insert polynucleotide or within a separate polynucleotide. The site-specific recombinase can be operably linked to a promoter active in the cell including, for example, an inducible promoter, a promoter that is endogenous to the cell, a promoter that is heterologous to the cell, a cell-specific promoter, a tissue-specific promoter, or a developmental stage-specific promoter. Site-specific recombination target sequences which can flank the insert polynucleotide or any polynucleotide of interest in the insert polynucleotide can include, but are not limited to, loxP, lox511, loχ2272, loχ66, lox71, loxM2, lox5171, FRT, FRT11, FRT71, attp, att, FRT, rox, and a combination thereof.

[0318] The target nucleic acid may comprise one or more of a genome, a chromosome, a plasmid, a gene, a promoter, an untranslated region, an open reading frame, an intron, an exon, or an operator. The target nucleic acid may comprise a segment of one or more of a genome, a chromosome, a plasmid, a gene, a promoter, an untranslated region, an open reading frame, an intron, an exon, or an operator. In some embodiments, the target nucleic acid may be part of a cell or an organism. In some embodiments, the target nucleic acid may be a cell-free genetic component.

[0319] In some embodiments, gene modifying or gene editing is achieved by fusing a programmable nuclease such as a CasΦ protein to a heterologous sequence. The heterologous sequence can be a suitable fusion partner, e.g., a polypeptide that provides recombinase activity by acting on the target nucleic acid sequence. In some embodiments, the fusion protein comprises a programmable nuclease such as a CasΦ protein fused to a heterologous sequence by a linker.

[0320] The heterologous sequence or fusion partner can be a site specific recombinase. The site specific recombinase can have recombinase activity. Examples of site-specific recombinases that can be used include, but are not limited to, Cre, Hin, Tre, and FLP recombinases. The heterologous sequence or fusion partner can be a recombinase catalytic domain. The recombinase catalytic domains can be from, for example, a tyrosine recombinase, a serine recombinase, a Gin recombinase, a Hin recombinase, a R recombinase, a Sin recombinase, a Tn3 recombinase, a γδ recombinase, a Cre recombinase, a FLP recombinase, or a phC31 integrase.

[0321] The heterologous sequence or fusion partner can be fused to the C-terminus, N-terminus, or an internal portion (e.g., a portion other than the N- or C-terminus) of the programmable nuclease, for example a dead CasΦ polypeptide.

[0322] The heterologous sequence or fusion partner can be fused to the programmable nuclease by a linker. A linker can be a peptide linker or a non-peptide linker. In some embodiments, the linker is an XTEN linker. In some embodiments, the linker comprises one or more repeats a tri-peptide GGS. In some embodiments, the linker is from 1 to 100 amino acids in length. In some embodiments, the linker is more 100 amino acids in length. In some embodiments, the linker is from 10 to 27 amino acids in length. A non-peptide linker can be a polyethylene glycol (PEG), polypropylene glycol (PPG), co-poly(ethylene/propylene) glycol, polyoxyethylene (POE), polyurethane, polyphosphazene, polysaccharides, dextran, polyvinyl alcohol, polyvinylpyrrolidones, polyvinyl ethyl ether, polyacryl amide, polyacrylate, polycyanoacrylates, lipid polymers, chitins, hyaluronic acid, heparin, or an alkyl linker.

[0323] In some embodiments, the CasΦ protein can comprise an enzymatically inactive and/or “dead” (abbreviated by “d”) programmable nuclease in combination (e.g., fusion) with a polypeptide comprising recombinase activity. Although a programmable CasΦ nuclease normally has nuclease activity, in some embodiments, a programmable CasΦ nuclease does not have nuclease activity.

[0324] A programmable nuclease can comprise a modified form of a wild type counterpart. The modified form of the wild type counterpart can comprise an amino acid change (e.g., deletion, insertion, or substitution) that reduces the nucleic acid-cleaving activity of the programmable nuclease. For example, a nuclease domain (e.g., RuvC domain) of a CasΦ polypeptide can be deleted or mutated so that it is no longer functional or comprises reduced nuclease activity. The modified form of the programmable nuclease can have less than 90%, less than 80%, less than 70%, less than 60%, less than 50%, less than 40%, less than 30%, less than 20%, less than 10%, less than 5%, or less than 1% of the nucleic acid-cleaving activity of the wild-type counterpart.

[0325] The modified form of a programmable nuclease can have no substantial nucleic acid-cleaving activity. When a programmable nuclease is a modified form that has no substantial nucleic acid-cleaving activity, it can be referred to as enzymatically inactive and/or dead. A dead CasΦ polypeptide (e.g., dCasΦ) can bind to a target nucleic acid sequence but may not cleave the target nucleic acid sequence. A dCasΦ polypeptide can associate with a guide nucleic acid to activate or repress transcription of a target nucleic acid sequence.

[0326] In some embodiments, a programmable nuclease is a dead CasΦ polypeptide. A dead CasΦ polypeptide can comprise at least 70%, at least 75%, at least 80%, at least 85%, at least 90%, at least 92%, at least 95%, at least 97%, at least 99%, or 100% sequence identity with any one of SEQ ID NO: 1-SEQ ID NO: 47, SEQ ID NO. 105, and SEQ ID NO 107. In some embodiments, a programmable nuclease is a dead CasΦ polypeptide comprising at least 85% sequence identity to any one of SEQ ID NO: 1-SEQ ID NO: 47, SEQ ID NO. 105, and SEQ ID NO 107. In some embodiments, a programmable nuclease is a dead CasΦ polypeptide comprising at least 90% sequence identity to any one of SEQ ID NO: 1-SEQ ID NO: 47, SEQ ID NO. 105, and SEQ ID NO 107. In some embodiments, a programmable nuclease is a dead CasΦ polypeptide comprising at least 95% sequence identity to any one of SEQ ID NO: 1-SEQ ID NO: 47, SEQ ID NO. 105, and SEQ ID NO 107. In some embodiments, a programmable nuclease is a dead CasΦ polypeptide comprising at least 98% sequence identity to any one of SEQ ID NO: 1-SEQ ID NO: 47, SEQ ID NO. 105, and SEQ ID NO 107.

[0327] A deadCasΦ (also referred to herein as “dCasΦ”) polypeptide can form a ribonucleoprotein complex with a guide nucleic acid. The guide nucleic acid can comprise a crRNA sequence comprising at least 70%, at least 80%, at least 90%, at least 92%, at least 95%, at least 97%, or at least 99%, or 100% sequence identity to any one of SEQ ID NO: 48-SEQ ID NO: 86, or a reverse complement thereof.

[0328] Enzymatically inactive can refer to a polypeptide that can bind to a nucleic acid sequence in a polynucleotide in a sequence-specific manner, but may not cleave a target polynucleotide. An enzymatically inactive site-directed polypeptide can comprise an enzymatically inactive domain (e.g. a programmable nuclease domain). Enzymatically inactive can refer to no activity. Enzymatically inactive can refer to substantially no activity. Enzymatically inactive can refer to essentially no activity. Enzymatically inactive can refer to an activity less than 1%, less than 2%, less than 3%, less than 4%, less than 5%, less than 6%, less than 7%, less than 8%, less than 9%, or less than 10% activity compared to a wild-type exemplary activity (e.g., nucleic acid cleaving activity, wild-type CasΦ activity).

[0329] In further embodiments, methods of modifying cells are provided. In some embodiments, a method of modifying a cell comprising a target nucleic acid wherein the method comprises introducing a programmable CasΦ nuclease or variant thereof disclosed herein to the cell, wherein the programmable CasΦ nuclease or variant cleaves or modifies the target nucleic acid.

[0330] Modified cells obtained or obtainable by the methods described herein are provided. In some embodiments, a modified cell is obtained or is obtained by a method of modifying a cell disclosed herein.

[0331] In some embodiments, a CasΦ polypeptide disclosed herein is expressed in a cell. In some embodiments, a CasΦ polypeptide disclosed herein complexed with a guide nucleic is expressed in a cell. In some embodiments, a method disclosed herein comprises modifying or editing a cell. In some embodiments, a modified cell is provided wherein a cell is modified by a CasΦ polypeptide disclosed herein. In some embodiments, a cell is provided wherein the cell comprises a CasΦ polypeptide disclosed herein.

### Methods of Nicking of a Target Nucleic Acid

[0332] Disclosed herein are methods of introducing a break into a target nucleic acid. In some embodiments, the break may be a single stranded break (e.g., a nick). The programmable nickases disclosed herein and a gRNA disclosed herein may be used to introduce a single-stranded break into a target nucleic acid, for example a single stranded break in a double-stranded DNA.

[0333] A method of introducing a break into a target nucleic acid may comprise contacting the target nucleic acid with a first guide nucleic acid (e.g., a guide nucleic acid comprising a region that binds to a first programmable nickase) and a second guide nucleic acid (e.g., a guide nucleic acid comprising a region that binds to a second programmable nickase). The first guide nucleic acid may comprise an additional region that binds to the target nucleic acid, and the second guide nucleic acid may comprise an additional region that binds to the target nucleic acid. The additional region of the first guide nucleic acid and the additional region of the second guide nucleic acid may bind opposing strands of the target nucleic acid.

[0334] In some embodiments, a programmable nickase of the disclosure can cleave a non-target strand of a double-stranded target nucleic acid (e.g., DNA). In some embodiments, the programmable nickase may not cleave the target strand of the double-stranded target nucleic acid (e.g., DNA). The strand of a double-stranded target nucleic acid that is complementary to and hybridizes with the guide nucleic acid can be called the target strand. The strand of the double-stranded target DNA that is complementary to the target strand, and therefore is not complementary to the guide nucleic acid can be called non-target strand.

[0335] The temperature at which a ribonucleoprotein (RNP) complex comprising a programmable nuclease and a guide nucleic acid is formed (i.e. the RNP complexing temperature) can affect the nickase activity of the programmable nuclease. For example, an RNP complex formed at room temperature can have a greater nickase activity than an RNP complex formed at 37° C. In some cases, the RNP complex can be formed at room temperature, for example, from about 20° C. to 22° C. In some cases, the RNP complex can be formed at, for example, about 15° C., about 16° C., about 17° C., about 18° C., about 19° C., about 20° C., about 21° C., about 22° C., about 23° C., about 24° C., or about 25° C.

[0336] In some embodiments, a programmable nuclease may exhibit at least about 1.1-fold, at least about 1.2-fold, at least about 1.3-fold, at least about 1.4-fold, at least about 1.5-fold, at least about 1.6-fold, at least about 1.7-fold, at least about 1.8-fold, at least about 1.9-fold, at least about 2-fold, at least about 2.1-fold, at least about 2.2-fold, at least about 2.3-fold, at least about 2.4-fold, at least about 2.5-fold, at least about 2.6-fold, at least about 2.7-fold, at least about 2.8-fold, at least about 2.9-fold, at least about 3-fold, at least about 3.5-fold, at least about 4-fold, at least about 4.5-fold, at least about 5-fold, at least about 5.5-fold, at least about 6-fold, at least about 7-fold, at least about 8-fold, at least about 9-fold, at least about 10-fold, at least about 15-fold, at least about 20-fold, at least about 30-fold, at least about 40-fold, or at least about 50-fold greater nicking activity when complexed with a guide RNA at room temperature as compared to when complexed at 37° C.

[0337] The crRNA repeat sequence of a guide nucleic acid can affect the nickase activity of a programmable nuclease. For example, a programmable nuclease can comprise enhanced or greater nickase activity when complexed with guide nucleic acids comprising certain crRNA repeat sequences. For example, a programmable nuclease can comprise greater nickase activity when complexed with a guide RNA comprising a crRNA repeat sequence of CasΦ.18 as shown in TABLE 2. In another example, a programmable nuclease can comprise greater nickase activity when complexed with a guide RNA comprising a crRNA repeat sequence of CasΦ.7 as shown in TABLE 2. In some embodiments, a programmable nuclease may exhibit at least about 1.1-fold, at least about 1.2-fold, at least about 1.3-fold, at least about 1.4-fold, at least about 1.5-fold, at least about 1.6-fold, at least about 1.7-fold, at least about 1.8-fold, at least about 1.9-fold, at least about 2-fold, at least about 2.1-fold, at least about 2.2-fold, at least about 2.3-fold, at least about 2.4-fold, at least about 2.5-fold, at least about 2.6-fold, at least about 2.7-fold, at least about 2.8-fold, at least about 2.9-fold, at least about 3-fold, at least about 3.5-fold, at least about 4-fold, at least about 4.5-fold, at least about 5-fold, at least about 5.5-fold, at least about 6-fold, at least about 7-fold, at least about 8-fold, at least about 9-fold, at least about 10-fold, at least about 15-fold, at least about 20-fold, at least about 30-fold, at least about 40-fold, or at least about 50-fold greater nicking activity when complexed with a guide RNA comprising a specific crRNA repeat sequence as compared to when in a complex with a guide RNA comprising another crRNA repeat sequence.

[0338] The programmable nucleases disclosed herein may exhibit cis-cleavage activity or target cleavage activity. Target cleavage activity may refer to the cleavage of a target nucleic acid by the programmable nuclease. In some cases, the cis-cleavage activity results in double-stranded breaks in the target nucleic acids. In some cases, the cis-cleavage activity results in single-stranded breaks in the target nucleic acids. In some cases, the cis-cleavage activity produces a mixture of double- and single-stranded breaks in the target nucleic acids. In further cases, the rates of cis-cleavage double- and single-strand break formation may be dependent on the sequence of the guide nucleic acid. In some cases, the ratio of cis-cleavage double- and single-strand break formation may be dependent on the sequence of the guide nucleic acid. In some cases, the ratio or rate of cis-cleavage double- and single-strand break formation may be dependent on the repeat sequence of the crRNA of the guide nucleic acid. In some cases, the ratio or rate of cis-cleavage double- and single-strand break formation may be dependent on the temperature at which the ribonucleoprotein complex comprising the programmable nuclease and the guide nucleic acid are complexed.

[0339] A programmable nuclease for use in modifying a target nucleic acid may have greater nicking activity as compared to double stranded cleavage activity. In some embodiments, a programmable nuclease may exhibit at least about 1.1-fold, at least about 1.2-fold, at least about 1.3-fold, at least about 1.4-fold, at least about 1.5-fold, at least about 1.6-fold, at least about 1.7-fold, at least about 1.8-fold, at least about 1.9-fold, at least about 2-fold, at least about 2.1-fold, at least about 2.2-fold, at least about 2.3-fold, at least about 2.4-fold, at least about 2.5-fold, at least about 2.6-fold, at least about 2.7-fold, at least about 2.8-fold, at least about 2.9-fold, at least about 3-fold, at least about 3.5-fold, at least about 4-fold, at least about 4.5-fold, at least about 5-fold, at least about 5.5-fold, at least about 6-fold, at least about 7-fold, at least about 8-fold, at least about 9-fold, at least about 10-fold, at least about 15-fold, at least about 20-fold, at least about 30-fold, at least about 40-fold, or at least about 50-fold greater nicking activity as compared to double stranded cleavage activity.

[0340] In other cases, a programmable nuclease for use in modifying a target nucleic acid may have greater double stranded cleavage activity as compared to nicking activity. In some embodiments, a programmable nuclease may exhibit at least about 1.1-fold, at least about 1.2-fold, at least about 1.3-fold, at least about 1.4-fold, at least about 1.5-fold, at least about 1.6-fold, at least about 1.7-fold, at least about 1.8-fold, at least about 1.9-fold, at least about 2-fold, at least about 2.1-fold, at least about 2.2-fold, at least about 2.3-fold, at least about 2.4-fold, at least about 2.5-fold, at least about 2.6-fold, at least about 2.7-fold, at least about 2.8-fold, at least about 2.9-fold, at least about 3-fold, at least about 3.5-fold, at least about 4-fold, at least about 4.5-fold, at least about 5-fold, at least about 5.5-fold, at least about 6-fold, at least about 7-fold, at least about 8-fold, at least about 9-fold, at least about 10-fold, at least about 15-fold, at least about 20-fold, at least about 30-fold, at least about 40-fold, or at least about 50-fold greater double stranded cleavage activity as compared to nicking activity.

[0341] In some embodiments, the nicking activity and double stranded cleavage activity of a programmable nuclease depend on the conditions and species present in the sample containing the programmable nuclease. In some cases, the nicking activity and double stranded cleavage activity of the programmable nuclease are responsive to the sequence of the crRNA present in the guide nucleic acid. In some cases, the ratio of nicking activity and double stranded cleavage activity can be modulated by changing the sequence of the crRNA present. In some cases, the nicking activity and double stranded cleavage activity of the programmable nuclease respond differently to changes in temperature (e.g., RNP complexing temperature), pH, osmolarity, buffer, target nucleic acid concentration, ionic strength, and inhibitor concentration. In some embodiments, the ratio of nicking activity to cleavage activity by a programmable nuclease can be actively controlled by adjusting sample conditions and crRNA sequences.

### Methods of Regulating Gene Expression

[0342] In some embodiments, the disclosure provided methods and compositions for regulating gene expression. The methods and compositions can comprise use of an enzymatically inactive and/or “dead” (abbreviated by “d”) programmable nuclease in combination (e.g., fusion) with a polypeptide comprising transcriptional regulation activity. Although a programmable CasΦ nuclease normally has nuclease activity, in some embodiments, a programmable CasΦ nuclease does not have nuclease activity.

[0343] A programmable nuclease can comprise a modified form of a wild type counterpart. The modified form of the wild type counterpart can comprise an amino acid change (e.g., deletion, insertion, or substitution) that reduces the nucleic acid-cleaving activity of the programmable nuclease. For example, a nuclease domain (e.g., RuvC domain) of a CasΦ polypeptide can be deleted or mutated so that it is no longer functional or comprises reduced nuclease activity. The modified form of the programmable nuclease can have less than 90%, less than 80%, less than 70%, less than 60%, less than 50%, less than 40%, less than 30%, less than 20%, less than 10%, less than 5%, or less than 1% of the nucleic acid-cleaving activity of the wild-type counterpart. The modified form of a programmable nuclease can have no substantial nucleic acid-cleaving activity. When a programmable nuclease is a modified form that has no substantial nucleic acid-cleaving activity, it can be referred to as enzymatically inactive and/or dead. A dead CasΦ polypeptide (e.g., dCasΦ) can bind to a target nucleic acid sequence but may not cleave the target nucleic acid sequence. A dCasΦ polypeptide can associate with a guide nucleic acid to activate or repress transcription of a target nucleic acid sequence.

[0344] In some embodiments, the disclosure provides a method of selectively modulating transcription of a gene in a cell. The method can comprise introducing into a cell a (i) fusion polypeptide comprising a dCasΦ polypeptide and a polypeptide comprising transcriptional regulation activity, or a nucleic acid comprising a nucleotide sequence encoding the fusion polypeptide, wherein the dCasΦ polypeptide is enzymatically inactive or exhibits reduced nucleic acid cleavage activity; and ii) a guide nucleic acid, or a nucleic acid comprising a nucleotide sequence encoding the guide nucleic acid.

[0345] In some embodiments, a programmable nuclease is a dead CasΦ polypeptide. A dead CasΦ polypeptide can comprise at least 70%, at least 75%, at least 80%, at least 85%, at least 90%, at least 92%, at least 95%, at least 97%, at least 99%, or 100% sequence identity with any one of SEQ ID NO: 1-SEQ ID NO: 47, SEQ ID NO. 105, and SEQ ID NO 107. In some embodiments, a programmable nuclease is a dead CasΦ polypeptide comprising at least 85% sequence identity to any one of SEQ ID NO: 1-SEQ ID NO: 47, SEQ ID NO. 105, and SEQ ID NO 107. In some embodiments, a programmable nuclease is a dead CasΦ polypeptide comprising at least 90% sequence identity to any one of SEQ ID NO: 1-SEQ ID NO: 47, SEQ ID NO. 105, and SEQ ID NO 107. In some embodiments, a programmable nuclease is a dead CasΦ polypeptide comprising at least 95% sequence identity to any one of SEQ ID NO: 1-SEQ ID NO: 47, SEQ ID NO. 105, and SEQ ID NO 107. In some embodiments, a programmable nuclease is a dead CasΦ polypeptide comprising at least 98% sequence identity to any one of SEQ ID NO: 1-SEQ ID NO: 47, SEQ ID NO. 105, and SEQ ID NO 107.

[0346] A deadCasΦ (also referred to herein as “dCasΦ”) polypeptide can form a ribonucleoprotein complex with a guide nucleic acid. The guide nucleic acid can comprise a crRNA sequence comprising at least 70%, at least 80%, at least 90%, at least 92%, at least 95%, at least 97%, or at least 99%, or 100% sequence identity to any one of SEQ ID NO: 48-SEQ ID NO: 86, or a reverse complement thereof.

[0347] Enzymatically inactive can refer to a polypeptide that can bind to a nucleic acid sequence in a polynucleotide in a sequence-specific manner, but may not cleave a target polynucleotide. An enzymatically inactive site-directed polypeptide can comprise an enzymatically inactive domain (e.g. a programmable nuclease domain). Enzymatically inactive can refer to no activity. Enzymatically inactive can refer to substantially no activity. Enzymatically inactive can refer to essentially no activity. Enzymatically inactive can refer to an activity less than 1%, less than 2%, less than 3%, less than 4%, less than 5%, less than 6%, less than 7%, less than 8%, less than 9%, or less than 10% activity compared to a wild-type exemplary activity (e.g., nucleic acid cleaving activity, wild-type CasΦ activity).

[0348] Transcription regulation can be achieved by fusing a programmable nuclease such as a dead CasΦ protein to a heterologous sequence. The heterologous sequence can be a suitable fusion partner, e.g., a polypeptide that provides an activity that increases, decreases, or otherwise regulates transcription by acting on the target nucleic acid sequence or on a polypeptide (e.g., a histone or other DNA-binding protein) associated with the target nucleic acid sequence. Non-limiting examples of suitable fusion partners include a polypeptide that provides for transcription activation activity, transcription repression activity, nuclease activity, transcription release factor activity, histone modification activity, histone acetyltransferase activity, nucleic acid association activity, DNA methylase activity, direct or indirect DNA demethylase activity, methyltransferase activity, demethylase activity, acetyltransferase activity, deacetylase activity, kinase activity, phosphatase activity, ubiquitin ligase activity, deubiquitinating activity, adenylation activity, deaminase activity, deadenylation activity, SUMOylating activity, deSUMOylating activity, ribosylation activity, deribosylation activity, myristoylation activity, or demyristoylation activity.

[0349] Illustrative modifications performed by a fusion polypeptide can comprise methylation, demethylation, acetylation, deacetylation, ubiquitination, deubiquitination, deamination, alkylation, depurination, oxidation, pyrimidine dimer formation, transposition, recombination, chain elongation, ligation, glycosylation. Phosphorylation, dephosphorylation, adenylation, deadenylation, SUMOylation, deSUMOylation, ribosylation, deribosylation, myristoylation, remodeling, cleavage, oxidoreduction, hydrolation, or isomerization.

[0350] The heterologous sequence or fusion partner can be fused to the C-terminus, N-terminus, or an internal portion (e.g., a portion other than the N- or C-terminus) of the programmable nuclease, for example a dead CasΦ polypeptide. Non-limiting examples of fusion partners include transcription activators, transcription repressors, histone lysine methyltransferases (KMT), Histone Lysine Demethylates, Histone lysine acetyltransferases (KAT), Histone lysine deacetylase, DNA methylases (adenosine or cytosine modification), deaminases, CTCF, periphery recruitment elements (e.g., Lamin A, Lamin B), and protein docking elements (e.g., FKBP/FRB).

[0351] Non-limiting examples of transcription activators include GAL4, VP16, VP64, and p65 subdomain (NFkappaB).

[0352] Non-limiting examples of transcription repressors include Kruippel associated box (KRAB or SKD), the Mad mSIN3 interaction domain (SID), and the ERF repressor domain (ERD).

[0353] Non-limiting examples of histone lysine methyltransferases (KMT) include members from KMT1 family (e.g., SUV39H1, SUV39H2, G9A, ESET/SETDB1, Clr4, Su(var)3-9), KMT2 family members (e.g., hSET1A, hSET1B, MLL 1 to 5, ASH1, and homologs (Trx, Trr, Ash1)), KMT3 family (SYMD2, NSD1), KMT4 (DOT1L and homologs), KMT5 family (Pr-SET7/8, SUV4-20H1, and homologs), KMT6 (EZH2), and KMT8 (e.g., RIZ1).

[0354] Non-limiting examples of Histone Lysine Demethylates (KDM) include members from KDM1 family (LSD1/BHC110, Splsd1/Swm1/Saf11 0, Su(var)3-3), KDM3 family (JHDM2a/b), KDM4 family (JMJD2A/JHDM3A, JMJD2B, JMJD2C/GASC1, JMJD2D, and homologs (Rph1)), KDM5 family (JARID1A/RBP2, JARID1B/PLU-1, JARIDIC/SMCX, JARID1D/SMCY, and homologs (Lid, Jhn2, Jmj2)), and KDM6 family (e.g., UTX, JMJD3).

[0355] Non-limiting examples of KAT include members of KAT2 family (hGCN5, PCAF, and homologs (dGCN5/PCAF, Gcn5), KAT3 family (CBP, p300, and homologs (dCBP/NEJ)), KAT4, KAT5, KAT6, KAT7, KAT8, and KAT13.

[0356] In some embodiments, the disclosure provides methods for increasing transcription of a target nucleic acid sequence. The transcription of a target nucleic acid sequence can increase by at least about 1.1 fold, at least about 1.2 fold, at least about 1.3 fold, at least about 1.4 fold, at least about 1.5 fold, at least about 1.6 fold, at least about 1.7 fold, at least about 1.8 fold, at least about 1.9 fold, at least about 2 fold, at least about 2.5 fold, at least about 3 fold, at least about 3.5 fold, at least about 4 fold, at least about 4.5 fold, at least about 5 fold, at least about 6 fold, at least about 7 fold, at least about 8 fold, at least about 9 fold, at least about 10 fold, at least about 12 fold, at least about 15 fold, at least about 20-fold, at least about 50-fold, at least about 70-fold, or at least about 100-fold compared to the level of transcription of the target nucleic acid sequence in the absence of a fusion polypeptide comprising a enzymatically inactive or enzymatically reduced programmable nuclease (e.g., dead CasΦ protein).

[0357] In some embodiments, the disclosure provides methods for decreasing transcription of a target nucleic acid sequence. The transcription of a target nucleic acid sequence can decrease by at least about 1.1 fold, at least about 1.2 fold, at least about 1.3 fold, at least about 1.4 fold, at least about 1.5 fold, at least about 1.6 fold, at least about 1.7 fold, at least about 1.8 fold, at least about 1.9 fold, at least about 2 fold, at least about 2.5 fold, at least about 3 fold, at least about 3.5 fold, at least about 4 fold, at least about 4.5 fold, at least about 5 fold, at least about 6 fold, at least about 7 fold, at least about 8 fold, at least about 9 fold, at least about 10 fold, at least about 12 fold, at least about 15 fold, at least about 20-fold, at least about 50-fold, at least about 70-fold, or at least about 100-fold compared to the level of transcription of the target nucleic acid sequence in the absence of a fusion polypeptide comprising a enzymatically inactive or enzymatically reduced programmable nuclease (e.g., dead Cas 12j protein).

### Method of Treating a Disorder

[0358] The compositions and methods described herein may be used to treat, prevent, or inhibit an ailment in a subject. The ailments may include diseases, cancers, genetic disorders, neoplasias, and infections. In some cases, the disease or disorder for treatment is a liver disease or disorder, an eye disease or disorder, cystic fibrosis, or a muscle disease or disorder. In some cases, the ailments are associated with one or more genetic sequences, including but not limited to 11-hydroxylase deficiency; 17,20-desmolase deficiency; 17-hydroxylase deficiency; 3-hydroxyisobutyrate aciduria; 3-hydroxysteroid dehydrogenase deficiency; 46,XY gonadal dysgenesis; AAA syndrome; ABCA3 deficiency; ABCC8-associated hyperinsulinism; aceruloplasminemia; achondrogenesis type 2; acral peeling skin syndrome; acrodermatitis enteropathica; adrenocortical micronodular hyperplasia; adrenoleukodystrophies; adrenomyeloneuropathies; Aicardi-Goutieres syndrome; Alagille disease; Alpers syndrome; alpha-mannosidosis; Alstrom syndrome; Alzheimer disease; amelogenesis imperfecta; amish type microcephaly; amyotrophic lateral sclerosis (ALS); anauxetic dysplasia; androgen insensitivity syndrome; Antley-Bixler syndrome; APECED, Apert syndrome, aplasia of lacrimal and salivary glands, argininemia, arrhythmogenic right ventricular dysplasia, Arts syndrome, ARVD2, arylsulfatase deficiency type metachromatic leokodystrophy, ataxia telangiectasia, autoimmune lymphoproliferative syndrome; autoimmune polyglandular syndrome type 1; autosomal dominant anhidrotic ectodermal dysplasia; autosomal dominant polycystic kidney disease; autosomal recessive microtia; autosomal recessive renal glucosuria; autosomal visceral heterotaxy; Bardet-Biedl syndrome; Bartter syndrome; basal cell nevus syndrome; Batten disease; benign recurrent intrahepatic cholestasis; beta-mannosidosis; Bethlem myopathy; Blackfan-Diamond anemia; blepharophimosis; Byler disease; C syndrome; CADASIL; carbamyl phosphate synthetase deficiency; cardiofaciocutaneous syndrome; Carney triad; carnitine palmitoyltransferase deficiencies; cartilage-hair hypoplasia; cblC type of combined methylmalonic aciduria; CD18 deficiency; CD3Z-associated primary T-cell immunodeficiency; CD40L deficiency; CDAGS syndrome; CDG1A; CDG1B; CDG1M; CDG2C; CEDNIK syndrome; central core disease; centronuclear myopathy; cerebral capillary malformation; cerebrooculofacioskeletal syndrome type 4; cerebrooculogacioskeletal syndrome; cerebrotendinous xanthomatosis; CHARGE association; cherubism; CHILD syndrome; chronic granulomatous disease; chronic recurrent multifocal osteomyelitis; citrin deficiency; classic hemochromatosis; CNPPB syndrome; cobalamin C disease; Cockayne syndrome; coenzyme Q10 deficiency; Coffin-Lowry syndrome; Cohen syndrome; combined deficiency of coagulation factors V; common variable immune deficiency; complete androgen insentivity; cone rod dystrophies; conformational diseases; congenital bile adid synthesis defect type 1; congenital bile adid synthesis defect type 2; congenital defect in bile acid synthesis type; congenital erythropoietic porphyria; congenital generalized osteosclerosis; Cornelia de Lange syndrome; Cousin syndrome; Cowden disease; COX deficiency; Crigler-Najjar disease; Crigler-Najjar syndrome type 1; Crisponi syndrome; Currarino syndrome; Curth-Macklin type ichthyosis hystrix; cutis laxa; cystic fibrosis; cystinosis; d-2-hydroxyglutaric aciduria; DDP syndrome; Dejerine-Sottas disease; Denys-Drash syndrome; desmin cardiomyopathy; desmin myopathy; DGUOK-associated mitochondrial DNA depletion; disorders of glutamate metabolism; distal spinal muscular atrophy type 5; DNA repair diseases; dominant optic atrophy; Doyne honeycomb retinal dystrophy; Duchenne muscular dystrophy; dyskeratosis congenita; Ehlers-Danlos syndrome type 4; Ehlers-Danlos syndromes; Elejalde disease; Ellis-van Creveld disease; Emery-Dreifuss muscular dystrophies; encephalomyopathic mtDNA depletion syndrome; enzymatic diseases; EPCAM-associated congenital tufting enteropathy; epidermolysis bullosa with pyloric atresia; exercise-induced hypoglycemia; facioscapulohumeral muscular dystrophy; Faisalabad histiocytosis; familial atypical mycobacteriosis; familial capillary malformation-arteriovenous; familial esophageal achalasia; familial glomuvenous malformation; familial hemophagocytic lymphohistiocytosis; familial mediterranean fever; familial megacalyces; familial schwannomatosisl; familial spina bifida; familial splenic asplenia/hypoplasia; familial thrombotic thrombocytopenic purpura; Fanconi disease; Feingold syndrome; FENIB; fibrodysplasia ossificans progressiva; FKTN; Francois-Neetens fleck corneal dystrophy; Frasier syndrome; Friedreich ataxia; FTDP-17; fucosidosis; G6PD deficiency; galactosialidosis; Galloway syndrome; Gardner syndrome; Gaucher disease; Gitelman syndrome; GLUT1 deficiency; glycogen storage disease type 1b; glycogen storage disease type 2; glycogen storage disease type 3; glycogen storage disease type 4; glycogen storage disease type 9a; glycogen storage diseases; GM1-gangliosidosis; Greenberg syndrome; Greig cephalopolysyndactyly syndrome; hair genetic diseases; HANAC syndrome; harlequin type ichtyosis congenita; HDR syndrome; hemochromatosis type 3; hemochromatosis type 4; hemophilia A; hereditary angioedema type 3; hereditary angioedemas; hereditary hemorrhagic telangiectasia; hereditary hypofibrinogenemia; hereditary intraosseous vascular malformation; hereditary leiomyomatosis and renal cell cancer; hereditary neuralgic amyotrophy; hereditary sensory and autonomic neuropathy type; Hermansky-Pudlak disease; HHH syndrome; HHT2; hidrotic ectodermal dysplasia type 1; hidrotic ectodermal dysplasias; HNF4A-associated hyperinsulinism; HNPCC; human immunodeficiency with microcephaly; Huntington disease; hyper-IgD syndrome; hyperinsulinism-hyperammonemia syndrome; hypertrophy of the retinal pigment epithelium; hypochondrogenesis; hypohidrotic ectodermal dysplasia; ICF syndrome; idiopathic congenital intestinal pseudo-obstruction; immunodeficiency with hyper-IgM type 1; immunodeficiency with hyper-IgM type 3; immunodeficiency with hyper-IgM type 4; immunodeficiency with hyper-IgM type 5; inborm errors of thyroid metabolism; infantile visceral myopathy; infantile X-linked spinal muscular atrophy; intrahepatic cholestasis of pregnancy; IPEX syndrome; IRAK4 deficiency; isolated congenital asplenia; Jeune syndrome Imag; Johanson-Blizzard syndrome; Joubert syndrome; JP-HHT syndrome; juvenile hemochromatosis; juvenile hyalin fibromatosis; juvenile nephronophthisis; Kabuki mask syndrome; Kallmann syndromes; Kartagener syndrome; KCNJ11-associated hyperinsulinism; Kearns-Sayre syndrome; Kostmann disease; Kozlowski type of spondylometaphyseal dysplasia; Krabbe disease; LADD syndrome; late infantile-onset neuronal ceroid lipofuscinosis; LCK deficiency; LDHCP syndrome; Legius syndrome; Leigh syndrome; lethal congenital contracture syndrome 2; lethal congenital contracture syndromes; lethal contractural syndrome type 3; lethal neonatal CPT deficiency type 2; lethal osteosclerotic bone dysplasia; LIG4 syndrome; lissencephaly type 1 Imag; lissencephaly type 3; Loeys-Dietz syndrome; low phospholipid-associated cholelithiasis; lysinuric protein intolerance; Maffucci syndrome; Majeed syndrome; mannose-binding protein deficiency; Marfan disease; Marshall syndrome; MASA syndrome; MCAD deficiency; McCune-Albright syndrome; MCKD2; Meckel syndrome; Meesmann corneal dystrophy; megacystis-microcolon-intestinal hypoperistalsis; megaloblastic anemia type 1; MEHMO; MELAS; Melnick-Needles syndrome; MEN2s; Menkes disease; metachromatic leukodystrophies; methylmalonic acidurias; methylvalonic aciduria; microcoria-congenital nephrosis syndrome; microvillous atrophy; mitochondrial neurogastrointestinal encephalomyopathy; monilethrix; monosomy X; mosaic trisomy 9 syndrome; Mowat-Wilson syndrome; mucolipidosis type 2; mucolipidosis type Ma; mucolipidosis type IV; mucopolysaccharidoses; mucopolysaccharidosis type 3A; mucopolysaccharidosis type 3C; mucopolysaccharidosis type 4B; multiminicore disease; multiple acyl-CoA dehydrogenation deficiency; multiple cutaneous and mucosal venous malformations; multiple endocrine neoplasia type 1; multiple sulfatase deficiency; NAIC; nail-patella syndrome; nemaline myopathies; neonatal diabetes mellitus; neonatal surfactant deficiency; nephronophtisis; Netherton disease; neurofibromatoses; neurofibromatosis type 1; Niemann-Pick disease type A; Niemann-Pick disease type B; Niemann-Pick disease type C; NKX2E; Noonan syndrome; North American Indian childhood cirrhosis; NROB1 duplication-associated DSD; ocular genetic diseases; oculo-auricular syndrome; OLEDAID; oligomeganephronia; oligomeganephronic renal hypolasia; Ollier disease; Opitz-Kaveggia syndrome; orofaciodigital syndrome type 1; orofaciodigital syndrome type 2; osseous Paget disease; otopalatodigital syndrome type 2; OXPHOS diseases; palmoplantar hyperkeratosis; panlobar nephroblastomatosis; Parkes-Weber syndrome; Parkinson disease; partial deletion of 21q22.2-q22.3; Pearson syndrome; Pelizaeus-Merzbacher disease; Pendred syndrome; pentalogy of Cantrell; peroxisomal acyl-CoA-oxidase deficiency; Peutz-Jeghers syndrome; Pfeiffer syndrome; Pierson syndrome; pigmented nodular adrenocortical disease; pipecolic acidemia; Pitt-Hopkins syndrome; plasmalogens deficiency; pleuropulmonary blastoma and cystic nephroma; polycystic lipomembranous osteodysplasia; porphyrias; premature ovarian failure; primary erythermalgia; primary hemochromatoses; primary hyperoxaluria; progressive familial intrahepatic cholestasis; propionic acidemia; pyruvate decarboxylase deficiency; RAPADILTINO syndrome; renal cystinosis; rhabdoid tumor predisposition syndrome; Rieger syndrome; ring chromosome 4; Roberts syndrome; Robinow-Sorauf syndrome; Rothmund-Thomson syndrome; SCID; Saethre-Chotzen syndrome; Sandhoff disease; SC phocomelia syndrome; SCAS; Schinzel phocomelia syndrome; short rib-polydactyly syndrome type 1; short rib-polydactyly syndrome type 4; short-rib polydactyly syndrome type 2; short-rib polydactyly syndrome type 3; Shwachman disease; Shwachman-Diamond disease; sickle cell anemia; Silver-Russell syndrome; Simpson-Golabi-Behmel syndrome; Smith-Lemli-Opitz syndrome; SPG7-associated hereditary spastic paraplegia; spherocytosis; split-hand/foot malformation with long bone deficiencies; spondylocostal dysostosis; sporadic visceral myopathy with inclusion bodies; storage diseases; STRA6-associated syndrome; Tay-Sachs disease; thanatophoric dysplasia; thyroid metabolism diseases; Tourette syndrome; transthyretin-associated amyloidosis; trisomy 13; trisomy 22; trisomy 2p syndrome; tuberous sclerosis; tufting enteropathy; urea cycle diseases; Van Den Ende-Gupta syndrome; Van der Woude syndrome; variegated mosaic aneuploidy syndrome; VLCAD deficiency; von Hippel-Lindau disease; Waardenburg syndrome; WAGR syndrome; Walker-Warburg syndrome; Werner syndrome; Wilson disease; Wolcott-Rallison syndrome; Wolfram syndrome; X-linked agammaglobulinemia; X-linked chronic idiopathic intestinal pseudo-obstruction; X-linked cleft palate with ankyloglossia; X-linked dominant chondrodysplasia punctata; X-linked ectodermal dysplasia; X-linked Emery-Dreifuss muscular dystrophy; X-linked lissencephaly; X-linked lymphoproliferative disease; X-linked visceral heterotaxy; xanthinuria type 1; xanthinuria type 2; xeroderma pigmentosum; XPV; and Zellweger disease. In some embodiments, the ailment is Duchenne muscular dystrophy. In some embodiments, the ailment is myotonic dystrophy Type 1 (DM1). In some embodiments, the ailment is blindness or an inherited disease affecting the back of the eye. In some embodiments, the ailment is deafness. In some embodiments, the ailment is progeria. In some embodiments, the ailment is multiple sclerosis. In some embodiments, the ailment is cancer. In some embodiments, the ailment is a lysosomal storage disease, e.g., Hunter syndrome, Hurler syndrome. In some embodiments, the ailment is hypercholesterolemia. In some embodiments, the ailment is Stargardt macular dystrophy. In some embodiments, the ailment is In preferred embodiments, the ailment is cystic fibrosis.

[0359] In some embodiments, treating, preventing, or inhibiting an ailment in a subject may comprise contacting a target nucleic acid associated with a particular ailment to a programmable nuclease (e.g., a CasΦ programmable nuclease). In some aspects, the methods of treating, preventing, or inhibiting an ailment may involve removing, modifying, replacing, transposing, or affecting the regulation of a genomic sequence of a patient in need thereof. In some embodiments, the methods of treating, preventing, or inhibiting an ailment may involve modulating gene expression. In some embodiments, the methods of treating, preventing, or inhibiting an ailment may comprise targeting a nucleic acid sequence associated with a pathogen, such as a virus or bacteria, to a programmable nuclease of the present disclosure.

[0360] The compositions and methods described herein may be used to treat, prevent, diagnose, or identify a cancer in a subject. In some aspects, the methods may target cells or tissues. In some embodiments, the methods may be applied to subjects, such as humans. As used herein, the term “cancer” refers to a physiological condition that may be characterized by abnormal or unregulated cell growth or activity. In some cases, cancer may involve the spread of the cells exhibiting abnormal or unregulated growth or activity between various tissues in a subject. In some aspects, cancer may be a genetic condition. Examples of cancers include, but are not limited to Acute Lymphoblastic Leukemia, Acute Myeloid Leukemia, Adrenocortical Carcinoma, Anal Cancer, Astrocytomas, Bile Duct Cancer, Bladder Cancer, Bone Cancer, Brain Cancer, Breast Cancer, Bronchial Cancer, Burkitt Lymphoma, Carcinoma, Cardiac Tumors, Cervical Cancer, Chordoma, Chronic Lymphocytic Leukemia, Chronic Myelogenous Leukemia, Chronic Myeloproliferative Neoplasms, Colon Cancer, Colorectal Cancer, Craniopharyngioma, Cutaneous T-cell lymphoma, Ductal Carcinoma, Embryonal Tumors, Endometrial Cancer, Ependymoma, Esophageal Cancer, Esthesioneuroblastoma, Ewing Sarcoma, Extracranial Germ Cell Tumors, Extragonadal Germ Cell Tumors, Fallopian Tube Cancer, Fibrous Histiocytoma, Gallbladder Cancer, Gastric Cancer, Gastrointestinal Cancer, Gastrointestinal Carcinoid Cancer, Gastrointestinal Stromal Tumors, Gestational Trophoblastic Disease, Hairy Cell Leukemia, Head and Neck Cancer, Heart Tumors, Hepatocellular Cancer, Histiocytosis, Hodgkin Lymphoma, Hypopharyngeal Cancer, Intraocular Melanoma, Islet Cell Tumors, Kaposi Sarcoma, Kidney cancer, Langerhans Cell Histiocytosis, Laryngeal Cancer, Leukemia, Lip and Oral Cavity Cancer, Liver Cancer, Lung Cancer, Lymphoma, Malignant Fibrous Histiocytoma, Melanoma, Merkel Cell Carcinoma, Mesothelioma, Metastatic Squamous Neck Cancer, Midline Tract Carcinoma, Mouth Cancer, Multiple Endocrine Neoplasia Syndromes, Multiple Myeloma, Mycosis Fungoides, Myelodysplastic Syndromes, Myelogenous Leukemia, Myeloid Leukemia, Myeloproliferative Neoplasms, Nasal Cavity and Paranasal Sinus Cancer, Nasopharyngeal Cancer, Neuroblastoma, Non-Hodgkin Lymphoma, Non-Small Cell Lung Cancer, Oral Cancer, Osteosarcoma, Ovarian Cancer, Pancreatic Cancer, Pancreatic Neuroendocrine Tumors, Papillomatosis, Paraganglioma, Paranasal Sinus and Nasal Cavity Cancer, Parathyroid Cancer, Penile Cancer, Pharyngeal Cancer, Pheochromocytoma, Pituitary Tumor, Plasma Cell Neoplasm, Pleuropulmonary Blastoma, Primary Central Nervous System (CNS) Lymphoma, Primary Peritoneal Cancer, Prostate Cancer, Rectal Cancer, Recurrent Cancer, Renal Cell Cancer, Retinoblastoma, Rhabdomyosarcoma, Salivary Gland Cancer, Sezary Syndrome, Skin Cancer, Small Cell Lung Cancer, Small Intestine Cancer, Soft Tissue Sarcoma, Squamous Cell Carcinoma, Squamous Neck Cancer with Occult Primary, Stomach Cancer, T-Cell Lymphoma, Testicular Cancer, Throat Cancer, Thymoma and Thymic Carcinoma, Thyroid Cancer, Tracheobronchial Cancer, Transitional Cell Cancer of the Renal Pelvis and Ureter, Ureter Cancer, Renal Pelvis Cancer, Urethral Cancer, Uterine Cancer, Uterine Sarcoma, Vaginal Cancer, Vascular Tumors, Vulvar Cancer, and Wilms Tumor.

[0361] In some cases, a cancer is associated with one or more particular biomarkers. A biomarker is a chemical species or profile that may serve as an indicator of a cellular or organismal state (e.g., the presence or absence of a disease). Non-limiting examples of biomarkers include biomolecules, nucleic acid sequences, proteins, metabolites, nucleic acids, protein modifications. A biomarker may refer to one species or to a plurality of species, such as a cell surface profile.

[0362] The methods of the present disclosure (e.g., methods of modifying a target nucleic acid) may comprise targeting a biomarker or a nucleic acid associated with a biomarker with a programmable nuclease of the disclosure (e.g., a CasΦ). In some cases, the biomarker is a gene associated with a cancer. Non-limiting examples of genes associated with cancers include, ABL, AF4/HRX, AKT-2, ALK, ALK/NPM, AML1, AML1/MTG8, APC, ATM, AXIN2, AXL, BAP1, BARD1, BCL-2, BCL-3, BCL-6, BCR/ABL, BLM, BMPR1A, BRCA1, BRCA2, BRIP1, c-MYC, CASR, CDC73, CDH1, CDK4, CDKN1B, CDKN1C, CDKN2A, CEBPA, CHEK2, CTNNA1, DBL, DEK/CAN, DICER1, DIS3L2, E2A/PBX1, EGFR, ENL/HRX, EPCAM, ERG/TLS, ERBB, ERBB-2, ETS-1, EWS/FLI-1, FH, FLCN, FMS, FOS, FPS, GATA2, GLI, GPGSP, GREM1, HER2/neu, HOX11, HOXB13, HST, IL-3, INT-2, JUN, KIT, KS3, K-SAM, LBC, LCK, LMO1, LMO2, L-MYC, LYL-1, LYT-10, LYT-10/Cα1, MAS, MAX, MDM-2, MEN1, MET, MITF, MLH1, MLL, MOS, MSH1, MSH2, MSH3, MSH6, MTG8/AML1, MUTYH, MYB, MYH11/CBFB, NBN, NEU, NF1, NF2, N-MYC, NTHL1, OST, PALB2, PAX-5, PBX1/E2A, PDGFRA, PHOX2B, PIM-1, PMS2, POLD1, POLE, POT1, PRAD-1, PRKAR1A, PTCH1, PTEN, RAD50, RAD51C, RAD51D, RAF, RAR/PML, RAS-H, RAS-K, RAS-N, RB1, RECQL4, REL/NRG, RET, RHOM1, RHOM2, ROS, RUNX1, SDHA, SDHAF, SDHB, SDHC, SDHD, SET/CAN, SIS, SKI, SMAD4, SMARCA4, SMARCB1, SMARCE1, SRC, STK11, SUFU, TAL1, TAL2, TAN-1, TIAM1, TERC, TERT, TMEM127, TP53, TSC1, TSC2, TRK, VHL, WRN, and WT1. In some cases, a gene biomarker for cancer will carry one or more mutations. In some cases, a gene biomarker for a cancer will be upregulated or downregulated relative to a patient or sample that does not have the cancer.

[0363] The compositions and methods described herein may be suitable for autologous or allogeneic treatment, as well as ex vivo cell-based treatments.

[0364] The compositions and methods described herein may be used to treat, prevent, diagnose, or identify an infection in a subject. In some embodiments, the subject is an animal (e.g., a mammal, such as a human). In some embodiments, the subject is a plant (e.g., a crop).

[0365] In some aspects, the disclosure provides the programmable CasΦ nucleases and compositions described herein for use in a method of treatment. In some embodiments, the disclosure provides the CasΦ programmable nucleases and compositions described herein for use in a method of treating an ailment recited above.

[0366] In some aspects, the disclosure provides the programmable CasΦ nucleases and compositions described herein for use as a medicament.

### Methods of Detecting a Target Nucleic Acid

[0367] The present disclosure provides methods and compositions, which enable target nucleic acid detection by programmable nuclease platforms, such as the DNA Endonuclease Targeted CRISPR TransReporter (DETECTR) platform. In some embodiments, the target nucleic acid is a DNA. In some embodiments, the target nucleic acid is a RNA.

[0368] A number of reagents are consistent with the compositions and methods disclosed herein. The reagents described herein may be used for nicking target nucleic acids and for detection of target nucleic acids. The reagents disclosed herein can include programmable nucleases, guide nucleic acids, target nucleic acids, and buffers. As described herein, target nucleic acid comprising DNA or RNA may be modified or detected (e.g., the target nucleic acid hybridizes to the guide nucleic) using a programmable nuclease (e.g., a CasΦ as disclosed herein) and other reagents disclosed herein. As described herein, target nucleic acids comprising DNA may be an amplicon of a nucleic acid of interest and the amplicon can be detected using a programmable nuclease (e.g., a CasΦ as disclosed herein) and other reagents disclosed herein. Additionally, detection of multiple target nucleic acids is possible using two or more programmable nickases or a programmable nickase with a non-nickase programmable nuclease complexed to guide nucleic acids that target the multiple target nucleic acids, wherein the programmable nucleases exhibit different sequence-independent cleavage of the nucleic acid of a reporter (e.g., cleavage of an RNA reporter by a first programmable nuclease and cleavage of a DNA reporter by a second programmable nuclease).

[0369] In some embodiments, target nucleic acid from a sample is amplified before assaying for cleavage of reporters. Target DNA can be amplified by PCR or isothermal amplification techniques. DNA amplification methods that are compatible with the DETECTR technology can be used for programmable nucleases disclosed herein. For example, ssDNA can be amplified. Amplification of ssDNA instead of dsDNA can enable PAM-independent detection of nucleic acids by proteins with PAM requirements for dsDNA-activated trans-cleavage.

[0370] Certain programmable nucleases (e.g., a CasΦ as disclosed herein) of the disclosure can exhibit indiscriminate trans-cleavage of ssDNA, enabling their use for detection of DNA in samples. In some embodiments, target ssDNA are generated from many nucleic acid templates (RNA, ss/dsDNA) in order to achieve cleavage of the FQ reporter in the DETECTR platform. Certain programmable nucleases can be activated by ssDNA, upon which they can exhibit trans-cleavage of ssDNA and can, thereby, be used to cleave ssDNA FQ reporter molecules in the DETECTR system. These programmable nucleases can target ssDNA present in the sample, or generated and/or amplified from any number of nucleic acid templates (RNA, ssDNA, or dsDNA).

[0371] The compositions, kits and methods disclosed herein may be implemented in methods of assaying for a target nucleic acid. In some embodiments, a method of assaying for a target nucleic acid in a sample, comprises: contacting the sample to a complex comprising a guide nucleic acid comprising a segment that is reverse complementary to a segment of the target nucleic acid and a programmable nuclease (e.g., a CasΦ as disclosed herein) of the disclosure that exhibits sequence independent cleavage upon forming a complex comprising the segment of the guide nucleic acid binding to the segment of the target nucleic acid, wherein the sample comprises at least one nucleic acid comprising at least 50% sequence identity to the segment of the target nucleic acid; and assaying for cleavage of at least one reporter nucleic acids of a population of reporter nucleic acids, wherein the cleavage indicates a presence of the target nucleic acid in the sample and wherein absence of the cleavage indicates an absence of the target nucleic acid in the sample.

[0372] The target nucleic acid can be from 0.05% to 20% of total nucleic acids in the sample. Sometimes, the target nucleic acid is from 0.1% to 10% of the total nucleic acids in the sample. The target nucleic acid, in some cases, is from 0.1% to 5% of the total nucleic acids in the sample. Often, a sample comprises the segment of the target nucleic acid and at least one nucleic acid comprising less than 100% sequence identity to the segment of the target nucleic acid but no less than 50% sequence identity to the segment of the target nucleic acid. For example, the segment of the target nucleic acid comprises a mutation as compared to at least one nucleic acid comprising less than 100% sequence identity to the segment of the target nucleic acid but no less than 50% sequence identity to the segment of the target nucleic acid. Often, the segment of the target nucleic acid comprises a single nucleotide mutation as compared to at least one nucleic acid comprising less than 100% sequence identity to the segment of the target nucleic acid but no less than 50% sequence identity to the segment of the target nucleic acid.

[0373] The concentrations of the various reagents in the programmable nuclease DETECTR reaction mix can vary depending on the particular scale of the reaction. For example, the final concentration of the programmable nuclease can vary from 1 μM to 1 nM, from 1 μM to 10 μM, from 10 μM to 100 μM, from 100 μM to 1 nM, from 1 nM to 10 nM, from 10 nM to 20 nM, from 20 nM to 30 nM, from 30 nM to 40 nM, from 40 nM to 50 nM, from 50 nM to 60 nM, from 60 nM to 70 nM, from 70 nM to 80 nM, from 80 nM to 90 nM, from 90 nM to 100 nM, from 100 nM to 200 nM, from 200 nM to 300 nM, from 300 nM to 400 nM, from 400 nM to 500 nM, from 500 nM to 600 nM, from 600 nM to 700 nM, from 700 nM to 800 nM, from 800 nM to 900 nM, from 900 nM to 1000 nM. The final concentration of the sgRNA complementary to the target nucleic acid can be from 1 μM to 1 nM, from 1 μM to 10 μM, from 10 μM to 100 μM, from 100 μM to 1 nM, from 1 nM to 10 nM, from 10 nM to 20 nM, from 20 nM to 30 nM, from 30 nM to 40 nM, from 40 nM to 50 nM, from 50 nM to 60 nM, from 60 nM to 70 nM, from 70 nM to 80 nM, from 80 nM to 90 nM, from 90 nM to 100 nM, from 100 nM to 200 nM, from 200 nM to 300 nM, from 300 nM to 400 nM, from 400 nM to 500 nM, from 500 nM to 600 nM, from 600 nM to 700 nM, from 700 nM to 800 nM, from 800 nM to 900 nM, from 900 nM to 1000 nM. The concentration of the ssDNA-FQ reporter can be from 1 μM to 1 nM, from 1 μM to 10 μM, from 10 μM to 100 μM, from 100 μM to 1 nM, from 1 nM to 10 nM, from 10 nM to 20 nM, from 20 nM to 30 nM, from 30 nM to 40 nM, from 40 nM to 50 nM, from 50 nM to 60 nM, from 60 nM to 70 nM, from 70 nM to 80 nM, from 80 nM to 90 nM, from 90 nM to 100 nM, from 100 nM to 200 nM, from 200 nM to 300 nM, from 300 nM to 400 nM, from 400 nM to 500 nM, from 500 nM to 600 nM, from 600 nM to 700 nM, from 700 nM to 800 nM, from 800 nM to 900 nM, from 900 nM to 1000 nM.

[0374] An example of a DETECTR reaction comprises, consists, or consists essentially of a final concentration of 100 nM CasΦ polypeptide or variant thereof, 125 nM sgRNA, and 50 nM ssDNA-FQ reporter in a total reaction volume of 20 μL. Reactions are incubated in a fluorescence plate reader (Tecan Infinite Pro 200 M Plex) for 2 hours at 37° C. with fluorescence measurements taken every 30 seconds (e.g., λex: 485 nm; λem: 535 nm). The fluorescence wavelength detected can vary depending on the reporter molecule.

[0375] Described herein are reagents comprising a single stranded reporter nucleic acid comprising a detection moiety, wherein the reporter nucleic acid (e.g., the ssDNA-FQ reporter described above) is capable of being cleaved by the programmable nuclease, upon generation and amplification of ssDNA from a nucleic acid template using the methods disclosed herein, thereby generating a first detectable signal.

[0376] The methods disclosed herein, thus, include generation and amplification of ssDNA from a target nucleic acid template (e.g., cDNA, ssDNA, or dsDNA) of interest in a sample, incubation of the ssDNA with an ssDNA activated programmable nuclease leading to indiscriminate, PAM-independent cleavage of reporter nucleic acids (also referred to as ssDNA-FQ reporters) to generate a detectable signal, and quantification of the detectable signal to detect a target nucleic acid sequence of interest.

### Reporters

[0377] Described herein are reagents comprising a reporter. The reporter can comprise a single stranded nucleic acid and a detection moiety (e.g., a labeled single stranded DNA reporter), wherein the nucleic acid is capable of being cleaved by the activated programmable nuclease (e.g., a CasΦ as disclosed herein), releasing the detection moiety, and, generating a detectable signal. As used herein, “reporter” is used interchangeably with “reporter nucleic acid” or “reporter molecule”. The programmable nucleases disclosed herein, activated upon hybridization of a guide RNA to a target nucleic acid, can cleave the reporter. Cleaving the “reporter” may be referred to herein as cleaving the “reporter nucleic acid,” the “reporter molecule,” or the “nucleic acid of the reporter.”

[0378] A major advantage of the compositions and methods disclosed herein can be the design of excess reporters to total nucleic acids in an unamplified or an amplified sample, not including the nucleic acid of the reporter. Total nucleic acids can include the target nucleic acids and non-target nucleic acids, not including the nucleic acid of the reporter. The non-target nucleic acids can be from the original sample, either lysed or unlysed. The non-target nucleic acids can also be byproducts of amplification. Thus, the non-target nucleic acids can include both non-target nucleic acids from the original sample, lysed or unlysed, and from an amplified sample. The presence of a large amount of non-target nucleic acids, an activated programmable nuclease (e.g., a CasΦ as disclosed herein) may be inhibited in its ability to bind and cleave the reporter sequences. This is because the activated programmable nuclease collaterally cleaves any nucleic acids. If total nucleic acids are in present in large amounts, they may outcompete reporters for the programmable nucleases. The compositions and methods disclosed herein are designed to have an excess of reporter to total nucleic acids, such that the detectable signals from DETECTR reactions are particularly superior. In some embodiments, the reporter can be present in at least 1.5 fold, at least 2 fold, at least 3 fold, at least 4 fold, at least 5 fold, at least 6 fold, at least 7 fold, at least 8 fold, at least 9 fold, at least 10 fold, at least 11 fold, at least 12 fold, at least 13 fold, at least 14 fold, at least 15 fold, at least 16 fold, at least 17 fold, at least 18 fold, at least 19 fold, at least 20 fold, at least 30 fold, at least 40 fold, at least 50 fold, at least 60 fold, at least 70 fold, at least 80 fold, at least 90 fold, at least 100 fold, from 1.5 fold to 100 fold, from 2 fold to 10 fold, from 10 fold to 20 fold, from 20 fold to 30 fold, from 30 fold to 40 fold, from 40 fold to 50 fold, from 50 fold to 60 fold, from 60 fold to 70 fold, from 70 fold to 80 fold, from 80 fold to 90 fold, from 90 fold to 100 fold, from 1.5 fold to 10 fold, from 1.5 fold to 20 fold, from 10 fold to 40 fold, from 20 fold to 60 fold, or from 10 fold to 80 fold excess of total nucleic acids.

[0379] Another significant advantage of the compositions and methods disclosed herein can be the design of an excess volume comprising the guide nucleic acid, the programmable nuclease (e.g., a CasΦ as disclosed herein), and the reporter, which contacts a smaller volume comprising the sample with the target nucleic acid of interest. The smaller volume comprising the sample can be unlysed sample, lysed sample, or lysed sample which has undergone any combination of reverse transcription, amplification, and in vitro transcription. The presence of various reagents in a crude, non-lysed sample, a lysed sample, or a lysed and amplified sample, such as buffer, magnesium sulfate, salts, the pH, a reducing agent, primers, dNTPs, NTPs, cellular lysates, non-target nucleic acids, primers, or other components, can inhibit the ability of the programmable nuclease to become activated or to find and cleave the nucleic acid of the reporter. This may be due to nucleic acids that are not the reporter outcompeting the nucleic acid of the reporter, for the programmable nuclease. Alternatively, various reagents in the sample may simply inhibit the activity of the programmable nuclease. Thus, the compositions and methods provided herein for contacting an excess volume comprising the guide nucleic acid, the programmable nuclease, and the reporter to a smaller volume comprising the sample with the target nucleic acid of interest provides for superior detection of the target nucleic acid by ensuring that the programmable nuclease is able to find and cleaves the nucleic acid of the reporter. In some embodiments, the volume comprising the guide nucleic acid, the programmable nuclease, and the reporter (can be referred to as “a second volume”) is 4-fold greater than a volume comprising the sample (can be referred to as “a first volume”). In some embodiments, the volume comprising the guide nucleic acid, the programmable nuclease, and the reporter (can be referred to as “a second volume”) is at least 1.5 fold, at least 2 fold, at least 3 fold, at least 4 fold, at least 5 fold, at least 6 fold, at least 7 fold, at least 8 fold, at least 9 fold, at least 10 fold, at least 11 fold, at least 12 fold, at least 13 fold, at least 14 fold, at least 15 fold, at least 16 fold, at least 17 fold, at least 18 fold, at least 19 fold, at least 20 fold, at least 30 fold, at least 40 fold, at least 50 fold, at least 60 fold, at least 70 fold, at least 80 fold, at least 90 fold, at least 100 fold, from 1.5 fold to 100 fold, from 2 fold to 10 fold, from 10 fold to 20 fold, from 20 fold to 30 fold, from 30 fold to 40 fold, from 40 fold to 50 fold, from 50 fold to 60 fold, from 60 fold to 70 fold, from 70 fold to 80 fold, from 80 fold to 90 fold, from 90 fold to 100 fold, from 1.5 fold to 10 fold, from 1.5 fold to 20 fold, from 10 fold to 40 fold, from 20 fold to 60 fold, or from 10 fold to 80 fold greater than a volume comprising the sample (can be referred to as “a first volume”). In some embodiments, the volume comprising the sample is at least 0.5 μL, at least 1 μL, at least at least 1 μL, at least 2 μL, at least 3 μL, at least 4 μL, at least 5 μL, at least 6 μL, at least 7 μL, at least 8 μL, at least 9 μL, at least 10 μL, at least 11 μL, at least 12 μL, at least 13 μL, at least 14 μL, at least 15 μL, at least 16 μL, at least 17 μL, at least 18 μL, at least 19 μL, at least 20 μL, at least 25 μL, at least 30 μL, at least 35 μL, at least 40 μL, at least 45 μL, at least 50 μL, at least 55 μL, at least 60 μL, at least 65 μL, at least 70 μL, at least 75 μL, at least 80 μL, at least 85 μL, at least 90 μL, at least 95 μL, at least 100 μL, from 0.5 μL to 5 μL μL, from 5 μL to 10 μL, from 10 μL to 15 μL, from 15 μL to 20 μL, from 20 μL to 25 μL, from 25 μL to 30 μL, from 30 μL to 35 μL, from 35 μL to 40 μL, from 40 μL to 45 μL, from 45 μL to 50 μL, from 10 μL to 20 μL, from 5 μL to 20 μL, from 1 μL to 40 μL, from 2 μL to 10 μL, or from 1 μL to 10 μL. In some embodiments, the volume comprising the programmable nuclease, the guide nucleic acid, and the reporter is at least 10 μL, at least 11 μL, at least 12 μL, at least 13 μL, at least 14 μL, at least 15 μL, at least 16 μL, at least 17 μL, at least 18 μL, at least 19 μL, at least 20 μL, at least 21 μL, at least 22 μL, at least 23 μL, at least 24 μL, at least 25 μL, at least 26 μL, at least 27 μL, at least 28 μL, at least 29 μL, at least 30 μL, at least 40 μL, at least 50 μL, at least 60 μL, at least 70 μL, at least 80 μL, at least 90 μL, at least 100 μL, at least 150 μL, at least 200 μL, at least 250 μL, at least 300 μL, at least 350 μL, at least 400 μL, at least 450 μL, at least 500 μL, from 10 μL to 15 μL μL, from 15 μL to 20 μL, from 20 μL to 25 μL, from 25 μL to 30 μL, from 30 μL to 35 μL, from 35 μL to 40 μL, from 40 μL to 45 μL, from 45 μL to 50 μL, from 50 μL to 55 μL, from 55 μL to 60 μL, from 60 μL to 65 μL, from 65 μL to 70 μL, from 70 μL to 75 μL, from 75 μL to 80 μL, from 80 μL to 85 μL, from 85 μL to 90 μL, from 90 μL to 95 μL, from 95 μL to 100 μL, from 100 μL to 150 μL, from 150 μL to 200 μL, from 200 μL to 250 μL, from 250 μL to 300 μL, from 300 μL to 350 μL, from 350 μL to 400 μL, from 400 μL to 450 μL, from 450 μL to 500 μL, from 10 μL to 20 μL, from 10 μL to 30 μL, from 25 μL to 35 μL, from 10 μL to 40 μL, from 20 μL to 50 μL, from 18 μL to 28 μL, or from 17 μL to 22 μL.

[0380] In some cases, the reporter nucleic acid is a single-stranded nucleic acid sequence comprising deoxyribonucleotides. In other cases, the reporter nucleic acid is a single-stranded nucleic acid sequence comprising ribonucleotides. The nucleic acid of a reporter can be a single-stranded nucleic acid sequence comprising at least one deoxyribonucleotide and at least one ribonucleotide. In some cases, the nucleic acid of a reporter is a single-stranded nucleic acid comprising at least one ribonucleotide residue at an internal position that functions as a cleavage site. In some cases, the nucleic acid of a reporter comprises at least 2, 3, 4, 5, 6, 7, 8, 9, or 10 ribonucleotide residues at an internal position. In some cases, the nucleic acid of a reporter comprises from 2 to 10, from 3 to 9, from 4 to 8, or from 5 to 7 ribonucleotide residues at an internal position. Sometimes the ribonucleotide residues are continuous. Alternatively, the ribonucleotide residues are interspersed in between non-ribonucleotide residues. In some cases, the nucleic acid of a reporter has only ribonucleotide residues. In some cases, the nucleic acid of a reporter has only deoxyribonucleotide residues. In some cases, the nucleic acid comprises nucleotides resistant to cleavage by the programmable nuclease described herein. In some cases, the nucleic acid of a reporter comprises synthetic nucleotides. In some cases, the nucleic acid of a reporter comprises at least one ribonucleotide residue and at least one non-ribonucleotide residue. In some cases, the nucleic acid of a reporter is 5-20, 5-15, 5-10, 7-20, 7-15, or 7-10 nucleotides in length. In some cases, the nucleic acid of a reporter is from 3 to 20, from 4 to 10, from 5 to 10, or from 5 to 8 nucleotides in length. In some cases, the nucleic acid of a reporter comprises at least one uracil ribonucleotide. In some cases, the nucleic acid of a reporter comprises at least two uracil ribonucleotides. Sometimes the nucleic acid of a reporter has only uracil ribonucleotides. In some cases, the nucleic acid of a reporter comprises at least one adenine ribonucleotide. In some cases, the nucleic acid of a reporter comprises at least two adenine ribonucleotides. In some cases, the nucleic acid of a reporter has only adenine ribonucleotides. In some cases, the nucleic acid of a reporter comprises at least one cytosine ribonucleotide. In some cases, the nucleic acid of a reporter comprises at least two cytosine ribonucleotides. In some cases, the nucleic acid of a reporter comprises at least one guanine ribonucleotide. In some cases, the nucleic acid of a reporter comprises at least two guanine ribonucleotides. A nucleic acid of a reporter can comprise only unmodified ribonucleotides, only unmodified deoxyribonucleotides, or a combination thereof. In some cases, the nucleic acid of a reporter is from 5 to 12 nucleotides in length. In some cases, the reporter nucleic acid is at least 2, at least 3, at least 4, at least 5, at least 6, at least 7, at least 8, at least 9, at least 10, at least 11, at least 12, at least 13, at least 14, at least 15, at least 16, at least 17, at least 18, at least 19, at least 20, at least 21, at least 22, at least 23, at least 24, at least 25, at least 26, at least 27, at least 28, at least 29, or at least 30 nucleotides in length. In some cases, the reporter nucleic acid is 2, 3, 4, 5, 6, 7, 8, 9, 10, 11, 12, 13, 14, 15, 16, 17, 18, 19, 20, 21, 22, 23, 24, 25, 26, 27, 28, 29, or 30 nucleotides in length.

[0381] The single stranded nucleic acid of a reporter comprises a detection moiety capable of generating a first detectable signal. Sometimes the reporter nucleic acid comprises a protein capable of generating a signal. A signal can be a calorimetric, potentiometric, amperometric, optical (e.g., fluorescent, colorimetric, etc.), or piezo-electric signal. In some cases, a detection moiety is on one side of the cleavage site. Optionally, a quenching moiety is on the other side of the cleavage site. Sometimes the quenching moiety is a fluorescence quenching moiety. In some cases, the quenching moiety is 5′ to the cleavage site and the detection moiety is 3′ to the cleavage site. In some cases, the detection moiety is 5′ to the cleavage site and the quenching moiety is 3′ to the cleavage site. Sometimes the quenching moiety is at the 5′ terminus of the nucleic acid of a reporter. Sometimes the detection moiety is at the 3′ terminus of the nucleic acid of a reporter. In some cases, the detection moiety is at the 5′ terminus of the nucleic acid of a reporter. In some cases, the quenching moiety is at the 3′ terminus of the nucleic acid of reporter. In some cases, the single-stranded nucleic acid of a reporter is at least one population of the single-stranded nucleic acid capable of generating a first detectable signal. In some cases, the single-stranded nucleic acid of a reporter is a population of the single stranded nucleic acid capable of generating a first detectable signal. Optionally, there is more than one population of single-stranded nucleic acid of a reporter. In some cases, there are 2, 3, 4, 5, 6, 7, 8, 9, 10, 11, 12, 13, 14, 15, 20, 30, 40, 50, or greater than 50, or any number spanned by the range of this list of different populations of single-stranded nucleic acids of a reporter capable of generating a detectable signal. In some cases, there are from 2 to 50, from 3 to 40, from 4 to 30, from 5 to 20, or from 6 to 10 different populations of single-stranded nucleic acids of a reporter capable of generating a detectable signal.

TABLE 3
Examples of_Single_Stranded Nucleic Acids in a Reporter

| 5′ Detection Moiety* | Sequence (SEQ ID NO) | 3′ Quencher* |
|---|---|---|
| /56-FAM/ | TTATTATT (SEQ ID NO: 95) | /3IABkFQ/ |
| /56-FAM/ | TTATTATT (SEQ ID NO: 95) | /3IABkFQ/ |
| /5IRD700/ | TTATTATT (SEQ ID NO: 95) | /3IRQC1N/ |
| /5TYE665/ | TTATTATT (SEQ ID NO: 95) | /3IAbRQSp/ |
| /5Alex594N/ | TTATTATT (SEQ ID NO: 95) | /3IAbRQSp/ |
| /5ATTO633N/ | TTATTATT (SEQ ID NO: 95) | /3IAbRQSp/ |
| /56-FAM/ | TTTTTT (SEQ ID NO: 96) | /3IABkFQ/ |
| /56-FAM/ | TTTTTTTT (SEQ ID NO: 97) | /3IABkFQ/ |
| /56-FAM/ | TTTTTTTTTT (SEQ ID NO: 98) | /3IABkFQ/ |
| /56-FAM/ | TTTTTTTTTTTT (SEQ ID NO: 99) | /3IABkFQ/ |
| /56-FAM/ | TTTTTTTTTTTTTT (SEQ ID NO: 100) | /3IABkFQ/ |
| /56-FAM/ | AAAAAA (SEQ ID NO: 101) | /3IABkFQ/ |
| /56-FAM/ | CCCCCC (SEQ ID NO: 102) | /3IABkFQ/ |
| /56-FAM/ | GGGGGG (SEQ ID NO: 103) | /3IABkFQ/ |
| /56-FAM/ | TTATTATT (SEQ ID NO: 104) | /3IABkFQ/ |

*This Table refers to the detection moiety and quencher moiety as their tradenames and their source is identified. However, alternatives, generics, or non-tradename moieties with similar function from other sources can also be used.
/56-FAM/: 5′ 6-Fluorescein (Integrated DNA Technologies)
/3IABkFQ/: 3′ Iowa Black FQ (Integrated DNA Technologies)
/5IRD700/: 5′ IRDye 700 (Integrated DNA Technologies)
/5TYE665/: 5′ TYE 665 (Integrated DNA Technologies)
/5Alex594N/: 5′ Alexa Fluor 594 (NHS Ester)(Integrated DNA Technologies)
/5ATTO633N/: 5′ ATTO TM 633 (NHS Ester)(Integrated DNA Technologies)
/3IRQCIN/: 3′ IRDye QC-1 Quencher (Li-Cor)
/3IAbRQSp/: 3′ Iowa Black RQ (Integrated DNA Technologies)

[0382] A detection moiety can be an infrared fluorophore. A detection moiety can be a fluorophore that emits fluorescence in the range of from 500 nm and 720 nm. A detection moiety can be a fluorophore that emits fluorescence in the range of from 500 nm and 720 nm. In some cases, the detection moiety emits fluorescence at a wavelength of 700 nm or higher. In other cases, the detection moiety emits fluorescence at about 660 nm or about 670 nm. In some cases, the detection moiety emits fluorescence in the range of from 500 to 520, 500 to 540, 500 to 590, 590 to 600, 600 to 610, 610 to 620, 620 to 630, 630 to 640, 640 to 650, 650 to 660, 660 to 670, 670 to 680, 690 to 690, 690 to 700, 700 to 710, 710 to 720, or 720 to 730 nm. In some cases, the detection moiety emits fluorescence in the range from 450 nm to 750 nm, from 500 nm to 650 nm, or from 550 to 650 nm. A detection moiety can be a fluorophore that emits a detectable fluorescence signal in the same range as 6-Fluorescein, IRDye 700, TYE 665, Alex Fluor, or ATTO TM 633 (NHS Ester). A detection moiety can be fluorescein amidite, 6-Fluorescein, IRDye 700, TYE 665, Alex Fluor 594, or ATTO TM 633 (NHS Ester). A detection moiety can be a fluorophore that emits a fluorescence in the same range as 6-Fluorescein (Integrated DNA Technologies), IRDye 700 (Integrated DNA Technologies), TYE 665 (Integrated DNA Technologies), Alex Fluor 594 (Integrated DNA Technologies), or ATTO TM 633 (NHS Ester) (Integrated DNA Technologies). A detection moiety can be fluorescein amidite, 6-Fluorescein (Integrated DNA Technologies), IRDye 700 (Integrated DNA Technologies), TYE 665 (Integrated DNA Technologies), Alex Fluor 594 (Integrated DNA Technologies), or ATTO TM 633 (NHS Ester) (Integrated DNA Technologies). Any of the detection moieties described herein can be from any commercially available source, can be an alternative with a similar function, a generic, or a non-tradename of the detection moieties listed.

[0383] A detection moiety can be chosen for use based on the type of sample to be tested. For example, a detection moiety that is an infrared fluorophore is used with a urine sample. As another example, SEQ ID NO: 87 with a fluorophore that emits a fluorescence around 520 nm is used for testing in non-urine samples, and SEQ ID NO: 94 with a fluorophore that emits a fluorescence around 700 nm is used for testing in urine samples.

[0384] A quenching moiety can be chosen based on its ability to quench the detection moiety. A quenching moiety can be a non-fluorescent fluorescence quencher. A quenching moiety can quench a detection moiety that emits fluorescence in the range of from 500 nm and 720 nm. A quenching moiety can quench a detection moiety that emits fluorescence in the range of from 500 nm and 720 nm. In some cases, the quenching moiety quenches a detection moiety that emits fluorescence at a wavelength of 700 nm or higher. In other cases, the quenching moiety quenches a detection moiety that emits fluorescence at about 660 nm or about 670 nm. In some cases, the quenching moiety quenches a detection moiety that emits fluorescence in the range of from 500 to 520, 500 to 540, 500 to 590, 590 to 600, 600 to 610, 610 to 620, 620 to 630, 630 to 640, 640 to 650, 650 to 660, 660 to 670, 670 to 680, 690 to 690, 690 to 700, 700 to 710, 710 to 720, or 720 to 730 nm. In some cases, the quenching moiety quenches a detection moiety that emits fluorescence in the range from 450 nm to 750 nm, from 500 nm to 650 nm, or from 550 to 650 nm. A quenching moiety can quench fluorescein amidite, 6-Fluorescein, IRDye 700, TYE 665, Alex Fluor 594, or ATTO TM 633 (NHS Ester). A quenching moiety can be Iowa Black RQ, Iowa Black FQ or IRDye QC-1 Quencher. A quenching moiety can quench fluorescein amidite, 6-Fluorescein (Integrated DNA Technologies), IRDye 700 (Integrated DNA Technologies), TYE 665 (Integrated DNA Technologies), Alex Fluor 594 (Integrated DNA Technologies), or ATTO TM 633 (NHS Ester) (Integrated DNA Technologies). A quenching moiety can be Iowa Black RQ (Integrated DNA Technologies), Iowa Black FQ (Integrated DNA Technologies) or IRDye QC-1 Quencher (LiCor). Any of the quenching moieties described herein can be from any commercially available source, can be an alternative with a similar function, a generic, or a non-tradename of the quenching moieties listed.

[0385] The generation of the detectable signal from the release of the detection moiety indicates that cleavage by the programmable nucleases has occurred and that the sample contains the target nucleic acid. In some cases, the detection moiety comprises a fluorescent dye. Sometimes the detection moiety comprises a fluorescence resonance energy transfer (FRET) pair. In some cases, the detection moiety comprises an infrared (IR) dye. In some cases, the detection moiety comprises an ultraviolet (UV) dye. Alternatively or in combination, the detection moiety comprises a polypeptide. Sometimes the detection moiety comprises a biotin. Sometimes the detection moiety comprises at least one of avidin or streptavidin. In some instances, the detection moiety comprises a polysaccharide, a polymer, or a nanoparticle. In some instances, the detection moiety comprises a gold nanoparticle or a latex nanoparticle.

[0386] A detection moiety can be any moiety capable of generating a calorimetric, potentiometric, amperometric, optical (e.g., fluorescent, colorimetric, etc.), or piezo-electric signal. A nucleic acid of a reporter, sometimes, is protein-nucleic acid that is capable of generating a calorimetric, potentiometric, amperometric, optical (e.g., fluorescent, colorimetric, etc.), or piezo-electric signal upon cleavage of the nucleic acid. Often a calorimetric signal is heat produced after cleavage of the nucleic acids of a reporter. Sometimes, a calorimetric signal is heat absorbed after cleavage of the nucleic acids of a reporter. A potentiometric signal, for example, is electrical potential produced after cleavage of the nucleic acids of a reporter. An amperometric signal can be movement of electrons produced after the cleavage of nucleic acid of a reporter. Often, the signal is an optical signal, such as a colorimetric signal or a fluorescence signal. An optical signal is, for example, a light output produced after the cleavage of the nucleic acids of a reporter. Sometimes, an optical signal is a change in light absorbance between before and after the cleavage of nucleic acids of a reporter. Often, a piezo-electric signal is a change in mass between before and after the cleavage of the nucleic acid of a reporter.

[0387] The detectable signal can be a colorimetric signal or a signal visible by eye. In some instances, the detectable signal can be fluorescent, electrical, chemical, electrochemical, or magnetic. In some cases, the first detection signal can be generated by binding of the detection moiety to the capture molecule in the detection region, where the first detection signal indicates that the sample contained the target nucleic acid. Sometimes the system can be capable of detecting more than one type of target nucleic acid, wherein the system comprises more than one type of guide nucleic acid and more than one type of reporter nucleic acid. In some cases, the detectable signal can be generated directly by the cleavage event. Alternatively or in combination, the detectable signal can be generated indirectly by the signal event. Sometimes the detectable signal is not a fluorescent signal. In some instances, the detectable signal can be a colorimetric or color-based signal. In some cases, the detected target nucleic acid can be identified based on its spatial location on the detection region of the support medium. In some cases, the second detectable signal can be generated in a spatially distinct location than the first generated signal.

[0388] Often, the protein-nucleic acid is an enzyme-nucleic acid. The enzyme may be sterically hindered when present as in the enzyme-nucleic acid, but then functional upon cleavage from the nucleic acid. Often, the enzyme is an enzyme that produces a reaction with a substrate. An enzyme can be invertase. Often, the substrate of invertase is sucrose. A DNS reagent produces a colorimetric change when invertase converts sucrose to glucose. In some cases, it is preferred that the nucleic acid (e.g., DNA) and invertase are conjugated using a heterobifunctional linker via sulfo-SMCC chemistry. Sometimes the protein-nucleic acid is a substrate-nucleic acid. Often the substrate is a substrate that produces a reaction with an enzyme.

[0389] A protein-nucleic acid may be attached to a solid support. The solid support, for example, is a surface. A surface can be an electrode. Sometimes the solid support is a bead. Often the bead is a magnetic bead. Upon cleavage, the protein is liberated from the solid and interacts with other mixtures. For example, the protein is an enzyme, and upon cleavage of the nucleic acid of the enzyme-nucleic acid, the enzyme flows through a chamber into a mixture comprising the substrate. When the enzyme meets the enzyme substrate, a reaction occurs, such as a colorimetric reaction, which is then detected. As another example, the protein is an enzyme substrate, and upon cleavage of the nucleic acid of the enzyme substrate-nucleic acid, the enzyme flows through a chamber into a mixture comprising the enzyme. When the enzyme substrate meets the enzyme, a reaction occurs, such as a calorimetric reaction, which is then detected.

[0390] Often, the signal is a colorimetric signal or a signal visible by eye. In some instances, the signal is fluorescent, electrical, chemical, electrochemical, or magnetic. A signal can be a calorimetric, potentiometric, amperometric, optical (e.g., fluorescent, colorimetric, etc.), or piezo-electric signal. In some cases, the detectable signal is a colorimetric signal or a signal visible by eye. In some instances, the detectable signal is fluorescent, electrical, chemical, electrochemical, or magnetic. In some cases, the first detection signal is generated by binding of the detection moiety to the capture molecule in the detection region, where the first detection signal indicates that the sample contained the target nucleic acid. Sometimes the system is capable of detecting more than one type of target nucleic acid, wherein the system comprises more than one type of guide nucleic acid and more than one type of nucleic acid of a reporter. In some cases, the detectable signal is generated directly by the cleavage event. Alternatively or in combination, the detectable signal is generated indirectly by the signal event. Sometimes the detectable signal is not a fluorescent signal. In some instances, the detectable signal is a colorimetric or color-based signal. In some cases, the detected target nucleic acid is identified based on its spatial location on the detection region of the support medium. In some cases, the second detectable signal is generated in a spatially distinct location than the first generated signal.

[0391] In some cases, the threshold of detection, for a subject method of detecting a single stranded target nucleic acid in a sample, is less than or equal to 10 nM. The term “threshold of detection” is used herein to describe the minimal amount of target nucleic acid that must be present in a sample in order for detection to occur. For example, when a threshold of detection is 10 nM, then a signal can be detected when a target nucleic acid is present in the sample at a concentration of 10 nM or more. In some cases, the threshold of detection is less than or equal to 5 nM, 1 nM, 0.5 nM, 0.1 nM, 0.05 nM, 0.01 nM, 0.005 nM, 0.001 nM, 0.0005 nM, 0.0001 nM, 0.00005 nM, 0.00001 nM, 10 μM, 1 μM, 500 fM, 250 fM, 100 fM, 50 fM, 10 fM, 5 fM, 1 fM, 500 attomole (aM), 100 aM, 50 aM, 10 aM, or 1 aM. In some cases, the threshold of detection is in a range of from 1 aM to 1 nM, 1 aM to 500 μM, 1 aM to 200 μM, 1 aM to 100 μM, 1 aM to 10 μM, 1 aM to 1 μM, 1 aM to 500 fM, 1 aM to 100 fM, 1 aM to 1 fM, 1 aM to 500 aM, 1 aM to 100 aM, 1 aM to 50 aM, 1 aM to 10 aM, 10 aM to 1 nM, 10 aM to 500 μM, 10 aM to 200 μM, 10 aM to 100 μM, 10 aM to 10 μM, 10 aM to 1 μM, 10 aM to 500 fM, 10 aM to 100 fM, 10 aM to 1 fM, 10 aM to 500 aM, 10 aM to 100 aM, 10 aM to 50 aM, 100 aM to 1 nM, 100 aM to 500 μM, 100 aM to 200 μM, 100 aM to 100 μM, 100 aM to 10 μM, 100 aM to 1 μM, 100 aM to 500 fM, 100 aM to 100 fM, 100 aM to 1 fM, 100 aM to 500 aM, 500 aM to 1 nM, 500 aM to 500 μM, 500 aM to 200 μM, 500 aM to 100 μM, 500 aM to 10 μM, 500 aM to 1 μM, 500 aM to 500 fM, 500 aM to 100 fM, 500 aM to 1 fM, 1 fM to 1 nM, 1 fM to 500 μM, 1 fM to 200 μM, 1 fM to 100 μM, 1 fM to 10 μM, 1 fM to 1 μM, 10 fM to 1 nM, 10 fM to 500 μM, 10 fM to 200 μM, 10 fM to 100 μM, 10 fM to 10 μM, 10 fM to 1 μM, 500 fM to 1 nM, 500 fM to 500 μM, 500 fM to 200 μM, 500 fM to 100 μM, 500 fM to 10 μM, 500 fM to 1 μM, 800 fM to 1 nM, 800 fM to 500 pM, 800 fM to 200 μM, 800 fM to 100 μM, 800 fM to 10 μM, 800 fM to 1 μM, 1 μM to 1 nM, 1 μM to 500 μM, 1 μM to 200 μM, 1 μM to 100 μM, or 1 μM to 10 μM. In some cases, the threshold of detection in a range of from 800 fM to 100 μM, 1 μM to 10 μM, 10 fM to 500 fM, 10 fM to 50 fM, 50 fM to 100 fM, 100 fM to 250 fM, or 250 fM to 500 fM. In some cases the threshold of detection is in a range of from 2 aM to 100 μM, from 20 aM to 50 μM, from 50 aM to 20 μM, from 200 aM to 5 μM, or from 500 aM to 2 μM. In some cases, the minimum concentration at which a single stranded target nucleic acid is detected in a sample is in a range of from 1 aM to 1 nM, 10 aM to 1 nM, 100 aM to 1 nM, 500 aM to 1 nM, 1 fM to 1 nM, 1 fM to 500 μM, 1 fM to 200 μM, 1 fM to 100 μM, 1 fM to 10 μM, 1 fM to 1 μM, 10 fM to 1 nM, 10 fM to 500 μM, 10 fM to 200 μM, 10 fM to 100 μM, 10 fM to 10 μM, 10 fM to 1 μM, 500 fM to 1 nM, 500 fM to 500 μM, 500 fM to 200 μM, 500 fM to 100 μM, 500 fM to 10 μM, 500 fM to 1 μM, 800 fM to 1 nM, 800 fM to 500 μM, 800 fM to 200 μM, 800 fM to 100 μM, 800 fM to 10 μM, 800 fM to 1 μM, 1 μM to 1 nM, 1 μM to 500 μM, from 1 μM to 200 μM, 1 μM to 100 μM, or 1 μM to 10 μM. In some cases, the minimum concentration at which a single stranded target nucleic acid is detected in a sample is in a range of from 2 aM to 100 μM, from 20 aM to 50 μM, from 50 aM to 20 μM, from 200 aM to 5 μM, or from 500 aM to 2 μM. In some cases, the minimum concentration at which a single stranded target nucleic acid can be detected in a sample is in a range of from 1 aM to 100 μM. In some cases, the minimum concentration at which a single stranded target nucleic acid can be detected in a sample is in a range of from 1 fM to 100 μM. In some cases, the minimum concentration at which a single stranded target nucleic acid can be detected in a sample is in a range of from 10 fM to 100 μM. In some cases, the minimum concentration at which a single stranded target nucleic acid can be detected in a sample is in a range of from 800 fM to 100 μM. In some cases, the minimum concentration at which a single stranded target nucleic acid can be detected in a sample is in a range of from 1 μM to 10 μM. In some cases, the devices, systems, fluidic devices, kits, and methods described herein detect a target single-stranded nucleic acid in a sample comprising a plurality of nucleic acids such as a plurality of non-target nucleic acids, where the target single-stranded nucleic acid is present at a concentration as low as 1 aM, 10 aM, 100 aM, 500 aM, 1 fM, 10 fM, 500 fM, 800 fM, 1 μM, 10 μM, 100 μM, or 1 μM.

[0392] In some embodiments, the target nucleic acid is present in the cleavage reaction at a concentration of about 10 nM, about 20 nM, about 30 nM, about 40 nM, about 50 nM, about 60 nM, about 70 nM, about 80 nM, about 90 nM, about 100 nM, about 200 nM, about 300 nM, about 400 nM, about 500 nM, about 600 nM, about 700 nM, about 800 nM, about 900 nM, about 1 μM, about 10 μM, or about 100 μM. In some embodiments, the target nucleic acid is present in the cleavage reaction at a concentration of from 10 nM to 20 nM, from 20 nM to 30 nM, from 30 nM to 40 nM, from 40 nM to 50 nM, from 50 nM to 60 nM, from 60 nM to 70 nM, from 70 nM to 80 nM, from 80 nM to 90 nM, from 90 nM to 100 nM, from 100 nM to 200 nM, from 200 nM to 300 nM, from 300 nM to 400 nM, from 400 nM to 500 nM, from 500 nM to 600 nM, from 600 nM to 700 nM, from 700 nM to 800 nM, from 800 nM to 900 nM, from 900 nM to 1 μM, from 1 μM to 10 μM, from 10 μM to 100 μM, from 10 nM to 100 nM, from 10 nM to 1 μM, from 10 nM to 10 μM, from 10 nM to 100 μM, from 100 nM to 1 μM, from 100 nM to 10 μM, from 100 nM to 100 μM, or from 1 μM to 100 μM. In some embodiments, the target nucleic acid is present in the cleavage reaction at a concentration of from 20 nM to 50 μM, from 50 nM to 20 μM, or from 200 nM to 5 μM.

[0393] In some cases, the methods, compositions, reagents, enzymes, and kits described herein may be used to detect a target single-stranded nucleic acid in a sample where the sample is contacted with the reagents for a predetermined length of time sufficient for the trans-cleavage to occur or cleavage reaction to reach completion. In some cases, the devices, systems, fluidic devices, kits, and methods described herein detect a target single-stranded nucleic acid in a sample where the sample is contacted with the reagents for no greater than 60 minutes. Sometimes the sample is contacted with the reagents for no greater than 120 minutes, 110 minutes, 100 minutes, 90 minutes, 80 minutes, 70 minutes, 60 minutes, 55 minutes, 50 minutes, 45 minutes, 40 minutes, 35 minutes, 30 minutes, 25 minutes, 20 minutes, 15 minutes, 10 minutes, 5 minutes, 4 minutes, 3 minutes, 2 minutes, or 1 minute. Sometimes the sample is contacted with the reagents for at least 120 minutes, 110 minutes, 100 minutes, 90 minutes, 80 minutes, 70 minutes, 60 minutes, 55 minutes, 50 minutes, 45 minutes, 40 minutes, 35 minutes, 30 minutes, 25 minutes, 20 minutes, 15 minutes, 10 minutes, or 5 minutes. In some cases, the sample is contacted with the reagents for from 5 minutes to 120 minutes, from 5 minutes to 100 minutes, from 10 minutes to 90 minutes, from 15 minutes to 45 minutes, or from 20 minutes to 35 minutes. In some cases, the devices, systems, fluidic devices, kits, and methods described herein can detect a target nucleic acid in a sample in less than 10 hours, less than 9 hours, less than 8 hours, less than 7 hours, less than 6 hours, less than 5 hours, less than 4 hours, less than 3 hours, less than 2 hours, less than 1 hour, less than 50 minutes, less than 45 minutes, less than 40 minutes, less than 35 minutes, less than 30 minutes, less than 25 minutes, less than 20 minutes, less than 15 minutes, less than 10 minutes, less than 9 minutes, less than 8 minutes, less than 7 minutes, less than 6 minutes, or less than 5 minutes. In some cases, the devices, systems, fluidic devices, kits, and methods described herein can detect a target nucleic acid in a sample in from 5 minutes to 10 hours, from 10 minutes to 8 hours, from 15 minutes to 6 hours, from 20 minutes to 5 hours, from 30 minutes to 2 hours, or from 45 minutes to 1 hour.

[0394] When a guide nucleic acid binds to a target nucleic acid, the programmable nuclease's trans-cleavage activity can be initiated, and nucleic acids of a reporter can be cleaved, resulting in the detection of fluorescence. The guide nucleic acid may be a non-naturally occurring guide nucleic acid. A non-naturally occurring guide nucleic acid may comprise an engineered sequence having a repeat and a spacer that hybridizes to a target nucleic acid sequence of interest. A non-naturally occurring guide nucleic acid may be recombinantly expressed or chemically synthesized. Nucleic acid reporters can comprise a detection moiety, wherein the nucleic acid reporter can be cleaved by the activated programmable nuclease, thereby generating a signal. Some methods as described herein can a method of assaying for a target nucleic acid in a sample comprises contacting the sample to a complex comprising a guide nucleic acid comprising a segment that is reverse complementary to a segment of the target nucleic acid and a programmable nuclease that exhibits sequence independent cleavage upon forming a complex comprising the segment of the guide nucleic acid binding to the segment of the target nucleic acid; and assaying for a signal indicating cleavage of at least some protein-nucleic acids of a population of protein-nucleic acids, wherein the signal indicates a presence of the target nucleic acid in the sample and wherein absence of the signal indicates an absence of the target nucleic acid in the sample. The cleaving of the nucleic acid of a reporter using the programmable nuclease may cleave with an efficiency of 50% as measured by a change in a signal that is calorimetric, potentiometric, amperometric, optical (e.g., fluorescent, colorimetric, etc.), or piezo-electric, as non-limiting examples. Some methods as described herein can be a method of detecting a target nucleic acid in a sample comprising contacting the sample comprising the target nucleic acid with a guide nucleic acid targeting a target nucleic acid segment, a programmable nuclease capable of being activated when complexed with the guide nucleic acid and the target nucleic acid segment, a single stranded nucleic acid of a reporter comprising a detection moiety, wherein the nucleic acid of a reporter is capable of being cleaved by the activated programmable nuclease, thereby generating a first detectable signal, cleaving the single stranded nucleic acid of a reporter using the programmable nuclease that cleaves as measured by a change in color, and measuring the first detectable signal on the support medium. The cleaving of the single stranded nucleic acid of a reporter using the programmable nuclease may cleave with an efficiency of 50% as measured by a change in color. In some cases, the cleavage efficiency is at least 40%, 50%, 60%, 70%, 80%, 90%, or 95% as measured by a change in color. The change in color may be a detectable colorimetric signal or a signal visible by eye. The change in color may be measured as a first detectable signal. The first detectable signal can be detectable within 5 minutes of contacting the sample comprising the target nucleic acid with a guide nucleic acid targeting a target nucleic acid segment, a programmable nuclease capable of being activated when complexed with the guide nucleic acid and the target nucleic acid segment, and a single stranded nucleic acid of a reporter comprising a detection moiety, wherein the nucleic acid of a reporter is capable of being cleaved by the activated nuclease. The first detectable signal can be detectable within 1, 2, 3, 4, 5, 6, 7, 8, 9, 10, 11, 12, 13, 14, 15, 20, 25, 30, 35, 40, 45, 50, 55, 60, 70, 80, 90, 100, 110, or 120 minutes of contacting the sample. In some embodiments, the first detectable signal can be detectable within from 1 to 120, from 5 to 100, from 10 to 90, from 15 to 80, from 20 to 60, or from 30 to 45 minutes of contacting the sample.

[0395] In some cases, the methods, reagents, enzymes, and kits described herein detect a target single-stranded nucleic acid with a programmable nuclease and a single-stranded nucleic acid of a reporter in a sample where the sample is contacted with the reagents for a predetermined length of time sufficient for trans-cleavage of the single stranded nucleic acid of a reporter.

[0396] Some methods as described herein can be a method of detecting a target nucleic acid in a sample comprising contacting the sample comprising the target nucleic acid with a guide nucleic acid targeting a target sequence, a programmable nuclease capable of being activated when complexed with the guide nucleic acid and the target sequence, a single stranded reporter nucleic acid comprising a detection moiety, wherein the reporter nucleic acid is capable of being cleaved by the activated nuclease, thereby generating a first detectable signal, cleaving the single stranded reporter nucleic acid using the programmable nuclease that cleaves as measured by a change in color, and measuring the first detectable signal on the support medium. The cleaving of the single stranded reporter nucleic acid using the programmable nuclease may cleave with an efficiency of 50% as measured by a change in color. In some cases, the cleavage efficiency is at least 40%, at least 50%, at least 60%, at least 70%, at least 80%, at least 90%, or at least 95% as measured by a change in color. The change in color may be a detectable colorimetric signal or a signal visible by eye. The change in color may be measured as a first detectable signal. The first detectable signal can be detectable within 5 minutes of contacting the sample comprising the target nucleic acid with a guide nucleic acid targeting a target sequence, a programmable nuclease capable of being activated when complexed with the guide nucleic acid and the target sequence, and a single stranded reporter nucleic acid comprising a detection moiety, wherein the reporter nucleic acid is capable of being cleaved by the activated nuclease. The first detectable signal can be detectable within 1, 2, 3, 4, 5, 6, 7, 8, 9, 10, 11, 12, 13, 14, 15, 20, 25, 30, 35, 40, 45, 50, 55, 60, 70, 80, 90, 100, 110, or 120 minutes of contacting the sample.

### Multiplexing Programmable Nucleases and Programmable Nickases

[0397] Described herein are compositions comprising a programmable nuclease (e.g., a CasΦ as disclosed herein) capable of being activated when complexed with the guide nucleic acid and the target nucleic acid molecule. Furthermore, these reagents can be used with different types of programmable nuclease, e.g., for multiplexing programmable nucleases. In some embodiments, the programmable nucleases can exist in RNP complexes that target multiple genes simultaneously. In some embodiments, a programmable nickase may be multiplexed with an additional programmable nuclease. For example, a programmable nickase may be multiplexed with an additional programmable nuclease for modification or detection of a target nucleic acid. In some embodiments, a first programmable nickase may be multiplexed with a second programmable nickase. In some embodiments, the programmable nickase may be a CasΦ programmable nickase.

[0398] In some embodiments, a CasΦ polypeptide disclosed herein may be multiplexed with multiple guide nucleic acids in the same sample, wherein the guide nucleic acids may comprise different sequences.

[0399] In some embodiments, an additional programmable nuclease used in multiplexing is any suitable programmable nuclease. Sometimes, the programmable nuclease is any Cas protein (also referred to as a Cas nuclease herein). In some cases, the programmable nuclease is Cas13. In some embodiments, the Cas13 is Cas13a, Cas13b, Cas13c, Cas13d, or Cas13e. In some cases, the programmable nuclease can be Mad7 or Mad2. In some cases, the programmable nuclease is a Cas12 protein. Sometimes the Cas12 is Cas12a, Cas12b, Cas12c, Cas12d, Cas12e, Cas12g, Cas12h, or Cas12i. In some cases, the programmable nuclease is another CasΦ protein. In some cases, the programmable nuclease is Csm1, Cas9, C2c4, C2c8, C2c5, C2c10, C2c9, or CasZ. Sometimes, the Csm1 can be also called smCms1, miCms1, obCms1, or suCms1. Sometimes CasZ can be also called Cas14a, Cas14b, Cas14c, Cas14d, Cas14e, Cas14f, Cas14g, or Cas14h. Sometimes, the programmable nuclease can be a type V CRISPR-Cas system. In some cases, the programmable nuclease can be a type VI CRISPR-Cas system. Sometimes the programmable nuclease can be a type III CRISPR-Cas system.

[0400] In some cases, an additional programmable nuclease used in multiplexing can be from, for example, Leptotrichia shahii (Lsh), Listeria seeligeri (Lse), Leptotrichia buccalis (Lbu), Leptotrichia wadeu (Lwa), Rhodobacter capsulatus (Rca), Herbinix hemicellulosilytica (Hhe), Paludibacter propionicigenes (Ppr), Lachnospiraceae bacterium (Lba), Eubacterium rectale (Ere), Listeria newyorkensis (Lny), Clostridium aminophilum (Cam), Prevotella sp. (Psm), Capnocytophaga canimorsus (Cca, Lachnospiraceae bacterium (Lba), Bergeyella zoohelcum (Bzo), Prevotella intermedia (Pin), Prevotella buccae (Pbu), Alistipes sp. (Asp), Riemerella anatipestifer (Ran), Prevotella aurantiaca (Pau), Prevotella saccharolytica (Psa), Prevotella intermedia (Pin2), Capnocytophaga canimorsus (Cca), Porphyromonas gulae (Pgu), Prevotella sp. (Psp), Porphyromonas gingivalis (Pig), Prevotella intermedia (Pin3), Enterococcus italicus (Ei), Lactobacillus salivarius (Ls), or Thermus thermophilus (Tt). In some cases, an additional programmable nuclease used in multiplexing can be from, for example, a phage such as a bacteriophage also called a megaphage. The nucleases may come from a particular bacteriophage clade called Biggiephage. Any combination of programmable nucleases can be used in multiplexing. In some embodiments, multiplexing of programmable nucleases takes place in one reaction volume. In other embodiments, multiplexing of programmable nucleases takes place in separate reaction volumes in a single device.

### Amplification of a Target Nucleic Acid

[0401] Disclosed herein are methods of amplifying a target nucleic acid for detection using any of the methods, reagents, kits or devices described herein. The compositions for amplification of target nucleic acids and methods of use thereof, as described herein, are compatible with the DETECTR assay methods disclosed herein. The compositions for amplification of target nucleic acids and methods of use thereof, as described herein, are compatible with any of the programmable nucleases disclosed herein and use of said programmable nuclease in a method of detecting a target nucleic acid. A target nucleic acid can be an amplified nucleic acid of interest. The nucleic acid of interest may be any nucleic acid disclosed herein or from any sample as disclosed herein. This amplification can be thermal amplification (e.g., using PCR) or isothermal amplification. This nucleic acid amplification of the sample can improve at least one of sensitivity, specificity, or accuracy of the detection the target nucleic acid. The reagents for nucleic acid amplification can comprise a recombinase, an oligonucleotide primer, a single-stranded DNA binding (SSB) protein, and a polymerase. The nucleic acid amplification can be transcription mediated amplification (TMA). Nucleic acid amplification can be helicase dependent amplification (HDA) or circular helicase dependent amplification (cHDA). In additional cases, nucleic acid amplification is strand displacement amplification (SDA). The nucleic acid amplification can be recombinase polymerase amplification (RPA). The nucleic acid amplification can be at least one of loop mediated amplification (LAMP) or the exponential amplification reaction (EXPAR). Nucleic acid amplification is, in some cases, by rolling circle amplification (RCA), ligase chain reaction (LCR), simple method amplifying RNA targets (SMART), single primer isothermal amplification (SPIA), multiple displacement amplification (MDA), nucleic acid sequence based amplification (NASBA), hinge-initiated primer-dependent amplification of nucleic acids (HIP), nicking enzyme amplification reaction (NEAR), or improved multiple displacement amplification (IMDA). The nucleic acid amplification can be performed for no greater than 1, 2, 3, 4, 5, 6, 7, 8, 9, 10, 11, 12, 13, 14, 15, 16, 17, 18, 19, 20, 25, 30, 40, 50, or 60 minutes. Sometimes, the nucleic acid amplification reaction is performed at a temperature of around 20-45° C. The nucleic acid amplification reaction can be performed at a temperature no greater than 20° C., 25° C., 30° C., 35° C., 37° C., 40° C., 45° C. The nucleic acid amplification reaction can be performed at a temperature of at least 20° C., 25° C., 30° C., 35° C., 37° C., 40° C., or 45° C.

[0402] The compositions for amplification of target nucleic acids and methods of use thereof, as described herein, are compatible with any of the compositions comprising a programmable nuclease and a buffer, which has been developed to improve the function of the programmable nuclease and use of said compositions in a method of detecting a target nucleic acid. The compositions for amplification of target nucleic acids and methods of use thereof, as described herein, are compatible with any of the methods disclosed herein including methods of assaying for at least one base difference (e.g., assaying for a SNP or a base mutation) in a target nucleic acid sequence, methods of assaying for a target nucleic acid that lacks a PAM by amplifying the target nucleic acid sequence to introduce a PAM, and compositions used in introducing a PAM via amplification into the target nucleic acid sequence. In some cases, amplification of the target nucleic acid may increase the sensitivity of a detection reaction. In some cases, amplification of the target nucleic acid may increase the specificity of a detection reaction. Amplification of the target nucleic acid may increase the concentration of the target nucleic acid in the sample relative to the concentration of nucleic acids that do not correspond to the target nucleic acid. In some embodiments, amplification of the target nucleic acid may be used to modify the sequence of the target nucleic acid. For example, amplification may be used to insert a PAM sequence into a target nucleic acid that lacks a PAM sequence. In some cases, amplification may be used to increase the homogeneity of a target nucleic acid sequence. For example, amplification may be used to remove a nucleic acid variation that is not of interest in the target nucleic acid sequence.

[0403] An amplified target nucleic acid may be present in a DETECTR reaction in an amount relative to an amount of a programmable nuclease. In some embodiments, the amplified target nucleic acid is present in at least 1-fold, 2-fold, 3-fold, 4-fold, 5-fold, 10-fold, 25-fold, 50-fold, 100-fold, 500-fold, 1000-fold, 10,000-fold, or 100,000-fold molar excess relative to the amount of the programmable nuclease. In some embodiments, the amplified target nucleic acid is present in no more than 1-fold, 2-fold, 3-fold, 4-fold, 5-fold, 10-fold, 25-fold, 50-fold, 100-fold, 500-fold, 1000-fold, 10,000-fold, or 100,000-fold molar excess relative to the amount of the programmable nuclease. In some embodiments, the amplified target nucleic acid is present in from 1-fold to 2-fold, from 1-fold to 3-fold, from 1-fold to 4-fold, from 1-fold to 5-fold, from 1-fold to 10-fold, from 1-fold to 25-fold, from 1-fold to 50-fold, from 1-fold to 100-fold, from 1-fold to 500-fold, from 1-fold to 1000-fold, from 1-fold to 10,000-fold, from 1-fold to 100,000-fold, from 5-fold to 10-fold, from 5-fold to 25-fold, from 5-fold to 50-fold, from 5-fold to 100-fold, from 5-fold to 500-fold, from 5-fold to 1000-fold, from 5-fold to 10,000-fold, from 5-fold to 100,000-fold, from 10-fold to 25-fold, from 10-fold to 50-fold, from 10-fold to 100-fold, from 10-fold to 500-fold, from 10-fold to 1000-fold, from 10-fold to 10,000-fold, from 10-fold to 100,000-fold, from 100-fold to 500-fold, from 100-fold to 1000-fold, from 100-fold to 10,000-fold, from 100-fold to 100,000-fold, from 1000-fold to 10,000-fold, from 1000-fold to 100,000-fold, or from 10,000-fold to 100,000-fold molar excess relative to the amount of the programmable nuclease. In some embodiments, the programmable nuclease is present in at least 1-fold, 2-fold, 3-fold, 4-fold, 5-fold, 10-fold, 25-fold, 50-fold, 100-fold, 500-fold, 1000-fold, 10,000-fold, or 100,000-fold molar excess relative to the amount of the target nucleic acid. In some embodiments, the programmable nuclease is present in no more than 1-fold, 2-fold, 3-fold, 4-fold, 5-fold, 10-fold, 25-fold, 50-fold, 100-fold, 500-fold, 1000-fold, 10,000-fold, or 100,000-fold molar excess relative to the amount of the target nucleic acid. In some embodiments, the programmable nuclease is present in from 1-fold to 2-fold, from 1-fold to 3-fold, from 1-fold to 4-fold, from 1-fold to 5-fold, from 1-fold to 10-fold, from 1-fold to 25-fold, from 1-fold to 50-fold, from 1-fold to 100-fold, from 1-fold to 500-fold, from 1-fold to 1000-fold, from 1-fold to 10,000-fold, from 1-fold to 100,000-fold, from 5-fold to 10-fold, from 5-fold to 25-fold, from 5-fold to 50-fold, from 5-fold to 100-fold, from 5-fold to 500-fold, from 5-fold to 1000-fold, from 5-fold to 10,000-fold, from 5-fold to 100,000-fold, from 10-fold to 25-fold, from 10-fold to 50-fold, from 10-fold to 100-fold, from 10-fold to 500-fold, from 10-fold to 1000-fold, from 10-fold to 10,000-fold, from 10-fold to 100,000-fold, from 100-fold to 500-fold, from 100-fold to 1000-fold, from 100-fold to 10,000-fold, from 100-fold to 100,000-fold, from 1000-fold to 10,000-fold, from 1000-fold to 100,000-fold, or from 10,000-fold to 100,000-fold molar excess relative to the amount of the target nucleic acid. In some embodiments, the target nucleic acid is not present in the sample.

[0404] An amplified target nucleic acid may be present in a DETECTR reaction in an amount relative to an amount of a guide nucleic acid. In some embodiments, the amplified target nucleic acid is present in at least 1-fold, 2-fold, 3-fold, 4-fold, 5-fold, 10-fold, 25-fold, 50-fold, 100-fold, 500-fold, 1000-fold, 10,000-fold, or 100,000-fold molar excess relative to the amount of the guide nucleic acid. In some embodiments, the amplified target nucleic acid is present in no more than 1-fold, 2-fold, 3-fold, 4-fold, 5-fold, 10-fold, 25-fold, 50-fold, 100-fold, 500-fold, 1000-fold, 10,000-fold, or 100,000-fold molar excess relative to the amount of the guide nucleic acid. In some embodiments, the amplified target nucleic acid is present in from 1-fold to 2-fold, from 1-fold to 3-fold, from 1-fold to 4-fold, from 1-fold to 5-fold, from 1-fold to 10-fold, from 1-fold to 25-fold, from 1-fold to 50-fold, from 1-fold to 100-fold, from 1-fold to 500-fold, from 1-fold to 1000-fold, from 1-fold to 10,000-fold, from 1-fold to 100,000-fold, from 5-fold to 10-fold, from 5-fold to 25-fold, from 5-fold to 50-fold, from 5-fold to 100-fold, from 5-fold to 500-fold, from 5-fold to 1000-fold, from 5-fold to 10,000-fold, from 5-fold to 100,000-fold, from 10-fold to 25-fold, from 10-fold to 50-fold, from 10-fold to 100-fold, from 10-fold to 500-fold, from 10-fold to 1000-fold, from 10-fold to 10,000-fold, from 10-fold to 100,000-fold, from 100-fold to 500-fold, from 100-fold to 1000-fold, from 100-fold to 10,000-fold, from 100-fold to 100,000-fold, from 1000-fold to 10,000-fold, from 1000-fold to 100,000-fold, or from 10,000-fold to 100,000-fold molar excess relative to the amount of the guide nucleic acid. In some embodiments, the guide nucleic acid is present in at least 1-fold, 2-fold, 3-fold, 4-fold, 5-fold, 10-fold, 25-fold, 50-fold, 100-fold, 500-fold, 1000-fold, 10,000-fold, or 100,000-fold molar excess relative to the amount of the target nucleic acid. In some embodiments, the guide nucleic acid is present in no more than 1-fold, 2-fold, 3-fold, 4-fold, 5-fold, 10-fold, 25-fold, 50-fold, 100-fold, 500-fold, 1000-fold, 10,000-fold, or 100,000-fold molar excess relative to the amount of the target nucleic acid. In some embodiments, the guide nucleic acid is present in from 1-fold to 2-fold, from 1-fold to 3-fold, from 1-fold to 4-fold, from 1-fold to 5-fold, from 1-fold to 10-fold, from 1-fold to 25-fold, from 1-fold to 50-fold, from 1-fold to 100-fold, from 1-fold to 500-fold, from 1-fold to 1000-fold, from 1-fold to 10,000-fold, from 1-fold to 100,000-fold, from 5-fold to 10-fold, from 5-fold to 25-fold, from 5-fold to 50-fold, from 5-fold to 100-fold, from 5-fold to 500-fold, from 5-fold to 1000-fold, from 5-fold to 10,000-fold, from 5-fold to 100,000-fold, from 10-fold to 25-fold, from 10-fold to 50-fold, from 10-fold to 100-fold, from 10-fold to 500-fold, from 10-fold to 1000-fold, from 10-fold to 10,000-fold, from 10-fold to 100,000-fold, from 100-fold to 500-fold, from 100-fold to 1000-fold, from 100-fold to 10,000-fold, from 100-fold to 100,000-fold, from 1000-fold to 10,000-fold, from 1000-fold to 100,000-fold, or from 10,000-fold to 100,000-fold molar excess relative to the amount of the target nucleic acid. In some embodiments, the target nucleic acid is not present in the sample.

### Kits

[0405] Disclosed herein are kits for use to detect, modify, edit, or regulate a target nucleic acid sequence as disclosed herein using the methods as discuss above. In some embodiments, the kit comprises the programmable nuclease system, reagents, and the support medium. The reagents and programmable nuclease system can be provided in a reagent chamber or on the support medium. Alternatively, the reagent and programmable nuclease system can be placed into the reagent chamber or the support medium by the individual using the kit. Optionally, the kit further comprises a buffer and a dropper. The reagent chamber can be a test well or container. The opening of the reagent chamber can be large enough to accommodate the support medium. The buffer can be provided in a dropper bottle for ease of dispensing. The dropper can be disposable and transfer a fixed volume. The dropper can be used to place a sample into the reagent chamber or on the support medium.

[0406] The kit or system for detection of a target nucleic acid described herein further comprises reagents for nucleic acid amplification of target nucleic acids in the sample. Isothermal nucleic acid amplification allows the use of the kit or system in remote regions or low resource settings without specialized equipment for amplification. Often, the reagents for nucleic acid amplification comprise a recombinase, an oligonucleotide primer, a single-stranded DNA binding (SSB) protein, and a polymerase. Sometimes, nucleic acid amplification of the sample improves at least one of sensitivity, specificity, or accuracy of the assay in detecting the target nucleic acid. In some cases, the nucleic acid amplification is performed in a nucleic acid amplification region on the support medium. Alternatively, or in combination, the nucleic acid amplification is performed in a reagent chamber, and the resulting sample is applied to the support medium. Sometimes, the nucleic acid amplification is isothermal nucleic acid amplification. In some cases, the nucleic acid amplification is transcription mediated amplification (TMA). Nucleic acid amplification is helicase dependent amplification (HDA) or circular helicase dependent amplification (cHDA) in other cases. In additional cases, nucleic acid amplification is strand displacement amplification (SDA). In some cases, nucleic acid amplification is by recombinase polymerase amplification (RPA). In some cases, nucleic acid amplification is by at least one of loop mediated amplification (LAMP) or the exponential amplification reaction (EXPAR). Nucleic acid amplification is, in some cases, by rolling circle amplification (RCA), ligase chain reaction (LCR), simple method amplifying RNA targets (SMART), single primer isothermal amplification (SPIA), multiple displacement amplification (MDA), nucleic acid sequence based amplification (NASBA), hinge-initiated primer-dependent amplification of nucleic acids (HIP), nicking enzyme amplification reaction (NEAR), or improved multiple displacement amplification (IMDA). Often, the nucleic acid amplification is performed for no greater than 1, 2, 3, 4, 5, 6, 7, 8, 9, 10, 11, 12, 13, 14, 15, 16, 17, 18, 19, 20, 25, 30, 40, 50, or 60 minutes, or any value from 1 to 60 minutes. Sometimes, the nucleic acid amplification is performed for from 1 to 60, from 5 to 55, from 10 to 50, from 15 to 45, from 20 to 40, or from 25 to 35 minutes. Sometimes, the nucleic acid amplification reaction is performed at a temperature of around 20-45° C. In some cases, the nucleic acid amplification reaction is performed at a temperature no greater than 20° C., 25° C., 30° C., 35° C., 37° C., 40° C., 45° C., or any value from 20° C. to 45° C. In some cases, the nucleic acid amplification reaction is performed at a temperature of at least 20° C., 25° C., 30° C., 35° C., 37° C., 40° C., or 45° C., or any value from 20° C. to 45° C. In some cases, the nucleic acid amplification reaction is performed at a temperature of from 20° C. to 45° C., from 25° C. to 40° C., from 30° C. to 40° C., or from 35° C. to 40° C.

[0407] In some embodiments, a kit for detecting a target nucleic acid comprising a support medium; a guide nucleic acid targeting a target sequence; a programmable nuclease capable of being activated when complexed with the guide nucleic acid and the target sequence; and a reporter nucleic acid comprising a detection moiety, wherein the reporter nucleic acid is capable of being cleaved by the activated nuclease, thereby generating a first detectable signal. Often, the kit further comprises primers for amplifying a target nucleic acid of interest to produce a PAM target nucleic acid.

[0408] In some embodiments, a kit for detecting a target nucleic acid comprising a PCR plate; a guide nucleic acid targeting a target sequence; a programmable nuclease capable of being activated when complexed with the guide nucleic acid and the target sequence; and a single stranded reporter nucleic acid comprising a detection moiety, wherein the reporter nucleic acid is capable of being cleaved by the activated nuclease, thereby generating a first detectable signal. The wells of the PCR plate can be pre-aliquoted with the guide nucleic acid targeting a target sequence, a programmable nuclease capable of being activated when complexed with the guide nucleic acid and the target sequence, and at least one population of a single stranded reporter nucleic acid comprising a detection moiety. A user can thus add the biological sample of interest to a well of the pre-aliquoted PCR plate and measure for the detectable signal with a fluorescent light reader or a visible light reader.

[0409] In some embodiments, a kit for modifying a target nucleic acid comprising a support medium; a guide nucleic acid targeting a target sequence; and a programmable nuclease capable of being activated when complexed with the guide nucleic acid and the target sequence.

[0410] In some embodiments, a kit for modifying a target nucleic acid comprising a PCR plate; a guide nucleic acid targeting a target sequence; and a programmable nuclease capable of being activated when complexed with the guide nucleic acid and the target sequence. The wells of the PCR plate can be pre-aliquoted with the guide nucleic acid targeting a target sequence, and a programmable nuclease capable of being activated when complexed with the guide nucleic acid and the target sequence. A user can thus add the biological sample of interest to a well of the pre-aliquoted PCR plate.

[0411] In some instances, such kits may include a package, carrier, or container that is compartmentalized to receive one or more containers such as vials, tubes, and the like, each of the container(s) comprising one of the separate elements to be used in a method described herein.

[0412] Suitable containers include, for example, test wells, bottles, vials, and test tubes. In one embodiment, the containers are formed from a variety of materials such as glass, plastic, or polymers.

[0413] The kit or systems described herein contain packaging materials. Examples of packaging materials include, but are not limited to, pouches, blister packs, bottles, tubes, bags, containers, bottles, and any packaging material suitable for intended mode of use.

[0414] A kit typically includes labels listing contents and/or instructions for use, and package inserts with instructions for use. A set of instructions will also typically be included. In one embodiment, a label is on or associated with the container. In some instances, a label is on a container when letters, numbers or other characters forming the label are attached, molded or etched into the container itself, a label is associated with a container when it is present within a receptacle or carrier that also holds the container, e.g., as a package insert. In one embodiment, a label is used to indicate that the contents are to be used for a specific therapeutic application. The label also indicates directions for use of the contents, such as in the methods described herein.

[0415] After packaging the formed product and wrapping or boxing to maintain a sterile barrier, the product may be terminally sterilized by heat sterilization, gas sterilization, gamma irradiation, or by electron beam sterilization. Alternatively, the product may be prepared and packaged by aseptic processing.

[0416] Unless otherwise defined, all technical terms used herein have the same meaning as commonly understood by one of ordinary skill in the art to which this invention belongs. As used in this specification and the appended claims, the singular forms “a,” “an,” and “the” include plural references unless the context clearly dictates otherwise. Any reference to “or” herein is intended to encompass “and/or” unless otherwise stated.

[0417] As used herein, the term “comprising” and its grammatical equivalents specifies the presence of stated features, integers, steps, operations, elements, and/or components, but do not preclude the presence or addition of one or more other features, integers, steps, operations, elements, components, and/or groups thereof. As used herein, the term “and/or” includes any and all combinations of one or more of the associated listed items.

[0418] Unless specifically stated or obvious from context, as used herein, the term “about” in reference to a number or range of numbers is understood to mean the stated number and numbers +/−10% thereof, or 10% below the lower listed limit and 10% above the higher listed limit for the values listed for a range.

[0419] As used herein the terms “individual,” “subject,” and “patient” are used interchangeably and include any member of the animal kingdom, including humans.

[0420] Methods of the disclosure can be performed in a subject. Compositions of the disclosure can be administered to a subject. A subject can be a human. A subject can be a mammal (e.g., rat, mouse, cow, dog, pig, sheep, horse). A subject can be a vertebrate or an invertebrate. A subject can be a laboratory animal. A subject can be a patient. A subject can be suffering from a disease. A subject can display symptoms of a disease. A subject may not display symptoms of a disease, but still have a disease. A subject can be under medical care of a caregiver (e.g., the subject is hospitalized and is treated by a physician). A subject can be a plant or a crop.

[0421] Methods of the disclosure can be performed in a cell. A cell can be in vitro. A cell can be in vivo. A cell can be ex vivo. A cell can be an isolated cell. A cell can be a cell inside of an organism. A cell can be an organism. A cell can be a cell in a cell culture. A cell can be one of a collection of cells. A cell can be a mammalian cell or derived from a mammalian cell. A cell can be a rodent cell or derived from a rodent cell. A cell can be a human cell or derived from a human cell. A cell can be a prokaryotic cell or derived from a prokaryotic cell. A cell can be a bacterial cell or can be derived from a bacterial cell. A cell can be an archaeal cell or derived from an archaeal cell. A cell can be a eukaryotic cell or derived from a eukaryotic cell. A cell can be a pluripotent stem cell. A cell can be a plant cell or derived from a plant cell. A cell can be an animal cell or derived from an animal cell. A cell can be an invertebrate cell or derived from an invertebrate cell. A cell can be a vertebrate cell or derived from a vertebrate cell. A cell can be a microbe cell or derived from a microbe cell. A cell can be a fungi cell or derived from a fungi cell. A cell can be from a specific organ or tissue.

[0422] Methods of the disclosure can be performed in a eukaryotic cell or cell line. In some embodiments, the eukaryotic cell is a Chinese hamster ovary (CHO) cell. In some embodiments, the eukaryotic cell is a Human embryonic kidney 293 cells (also referred to as HEK or HEK 293) cell. In some embodiments, the eukaryotic cell is a K562 cell.

[0423] Non-limiting examples of cell lines that can be used with the disclosure include C8161, CCRF-CEM, MOLT, mIMCD-3, NHDF, HeLa-S3, Huh1, Huh4, Huh7, HUVEC, HASMC, HEKn, HEKa, MiaPaCell, Panc1, PC-3, TF1, CTLL-2, CIR, Rat6, CV1, RPTE, A10, T24, J82, A375, ARH-77, Calu1, SW480, SW620, SKOV3, SK-UT, CaCo2, P388D1, SEM-K2, WEHI-231, HB56, TIB55, Jurkat, J45.01, LRMB, Bcl-1, BC-3, IC21, DLD2, Raw264.7, NRK, NRK-52E, MRC5, MEF, Hep G2, HeLa B, HeLa T4, COS, COS-1, COS-6, COS-M6A, BS-C-1 monkey kidney epithelial, BALB/3T3 mouse embryo fibroblast, 3T3 Swiss, 3T3-L1, 132-d5 human fetal fibroblasts; 10.1 mouse fibroblasts, 293-T, 3T3, 721, 9L, A2780, A2780ADR, A2780cis, A172, A20, A253, A431, A-549, ALC, B16, B35, BCP-1 cells, BEAS-2B, bEnd.3, BHK-21, BR 293, BxPC3, C3H-10T1/2, C6/36, Cal-27, CHO, CHO-7, CHO-IR, CHO-K1, CHO-K2, CHO-T, CHO Dhfr −/−, COR-L23, COR-L23/CPR, COR-L23/5010, COR-L23/R23, COS-7, COV-434, CML T1, CMT, CT26, D17, DH82, DU145, DuCaP, EL4, EM2, EM3, EMT6/AR1, EMT6/AR10.0, FM3, H1299, H69, HB54, HB55, HCA2, HEK-293, HeLa, Hepa1-6, Hepa1c1c7, HL-60, HMEC, HT-29, Jurkat, JY cells, K562 cells, Ku812, KCL22, KG1, KYO1, LNCap, Ma-Mel 1-48, MC-38, MCF-7, MCF-10A, MDA-MB-231, MDA-MB-468, MDA-MB-435, MDCK II, MDCK II, MOR/0.2R, MONO-MAC 6, MTD-1A, MyEnd, NCI-H69/CPR, NCI-H69/LX10, NCI-H69/LX20, NCI-H69/LX4, NIH-3T3, NALM-1, NW-145, OPCN/OPCT cell lines, Peer, PNT-1A/PNT 2, RenCa, RIN-5F, RMA/RMAS, Saos-2 cells, Sf-9, SkBr3, T2, T-47D, T84, THP1 cell line, U373, U87, U937, VCaP, Vero cells, WM39, WT-49, X63, YAC-1, and YAR. Non-limiting examples of other cells that can be used with the disclosure include immune cells, such as CART, T-cells, B-cells, NK cells, granulocytes, basophils, eosinophils, neutrophils, mast cells, monocytes, macrophages, dendritic cells, antigen-presenting cells (APC), or adaptive cells. Non-limiting examples of cells that can be used with this disclosure also include plant cells, such as Parenchyma, sclerenchyma, collenchyma, xylem, phloem, germline (e.g., pollen). Cells from lycophytes, ferns, gymnosperms, angiosperms, bryophytes, charophytes, chloropytes, rhodophytes, or glaucophytes. Non-limiting examples of cells that can be used with this disclosure also include stem cells, such as human stem cells, animal stem cells, stem cells that are not derived from human embryonic stem cells, embryonic stem cells, mesenchymal stem cells, pluripotent stem cells, induced pluripotent stem cells (iPS), somatic stem cells, adult stem cells, hematopoietic stem cells, tissue-specific stem cells.

[0424] Methods described herein may be used to create populations of cells comprising at least one of the cells described herein. In some cases, a population of cells comprises a non-naturally occurring compositions described herein.

[0425] Compositions of the disclosure include populations of cells, or any progeny thereof, comprising other compositions described herein or that have been modified by the methods described herein.

[0426] Methods described herein may include producing a protein from a cell or a population of cells described herein. In some cases, the method comprises producing a protein, and industrial protein, or a protein at large scale using a cell provided for herein that has been modified by any of the methods described herein. In some cases, a rodent cell or CHO cell is modified by a nuclease or cas enzyme described herein and is later used, expanded, or cultured for protein production. In some cases, a derivative or progeny of a modified CHO cell, as described herein, is used, expanded, or cultured for protein production. A method of protein production may further comprise a donor template, additional guide RNA, a buffer, a protease inhibitor, a nuclease inhibitor, or a detergent.

### EXAMPLES

[0427] The following examples are included to further describe some aspects of the present disclosure and should not be used to limit the scope of the invention.

### Example 1

### Human Codon Optimized CasΦ Polypeptide

[0428] Human codon-optimized nucleotide sequences of illustrative CasΦ polypeptides were prepared. TABLE 4 provides human codon optimized nucleotide sequences of illustrative CasΦ polypeptides that are suitable for use with the methods and compositions of the disclosure.

TABLE 4
Human codon optimized nucleotide sequences

| | Endogenous Amino | |
|---|---|---|
| Name | Acid Sequence | Human Codon Optimized Nucleotide Sequence |
| CasΦ.2 | MPKPAVESEFSKVLK | ATGCCTAAGCCTGCCGTGGAAAGCGAGTTCAG |
| | KHFPGERFRSSYMKR | CAAGGTGCTGAAGAAGCACTTCCCCGGCGAGC |
| | GGKILAAQGEEAVVA | GGTTCAGATCCAGCTACATGAAGAGAGGCGGC |
| | YLQGKSEEEPPNFQPP | AAGATCCTGGCCGCTCAAGGCGAAGAAGCCGT |
| | AKCHVVTKSRDFAE | GGTCGCATATCTGCAGGGCAAGAGCGAGGAA |
| | WPIMKASEAIQRYIYA | GAACCTCCTAACTTCCAGCCTCCTGCCAAGTG |
| | LSTTERAACKPGKSSE | CCACGTGGTCACCAAGAGCAGAGATTTCGCCG |
| | SHAAWFAATGVSNH | AGTGGCCCATCATGAAGGCCTCTGAAGCCATC |
| | GYSHVQGLNLIFDHT | CAGCGGTACATCTACGCCCTGAGCACAACAGA |
| | LGRYDGVLKKVQLR | AAGAGCCGCCTGCAAGCCTGGCAAGAGCAGC |
| | NEKARARLESINASR | GAATCTCACGCCGCTTGGTTTGCCGCTACCGG |
| | ADEGLPEIKAEEEEVA | CGTGTCCAATCACGGCTACTCTCATGTGCAGG |
| | TNETGHLLQPPGINPS | GCCTGAACCTGATCTTCGATCACACCCTGGGC |
| | FYVYQTISPQAYRPRD | AGATACGACGGCGTGCTGAAAAAGGTGCAGC |
| | EIVLPPEYAGYVRDPN | TGCGGAACGAGAAGGCCAGAGCCAGACTGGA |
| | APIPLGVVRNRCDIQK | ATCCATCAACGCCAGCAGAGCCGATGAGGGCC |
| | GCPGYIPEWQREAGT | TGCCTGAGATTAAGGCCGAAGAGGAAGAGGT |
| | AISPKTGKAVTVPGLS | GGCCACAAACGAAACCGGCCATCTGCTGCAGC |
| | PKKNKRMRRYWRSE | CACCTGGCATCAACCCTAGCTTCTACGTGTAC |
| | KEKAQDALLVTVRIG | CAGACAATCAGCCCTCAGGCCTACAGACCCAG |
| | TDWVVIDVRGLLRNA | GGACGAGATTGTGCTGCCTCCTGAGTATGCCG |
| | RWRTIAPKDISLNALL | GCTACGTGCGGGATCCCAACGCTCCTATTCCT |
| | DLFTGDPVIDVRRNIV | CTGGGCGTCGTGCGGAACAGATGCGACATCCA |
| | TFTYTLDACGTYARK | GAAAGGCTGCCCCGGCTACATTCCCGAGTGGC |
| | WTLKGKQTKATLDK | AGAGAGAAGCCGGCACCGCCATTTCTCCAAAG |
| | LTATQTVALVAIDLG | ACAGGCAAAGCCGTGACCGTGCCTGGCCTGTC |
| | QTNPISAGISRVTQEN | TCCTAAGAAAAACAAGCGGATGCGGCGGTACT |
| | GALQCEPLDRFTLPD | GGCGGAGCGAGAAAGAAAAAGCCCAGGACGC |
| | DLLKDISAYRIAWDR | CCTGCTGGTCACAGTGCGGATTGGCACAGATT |
| | NEEELRARSVEALPE | GGGTCGTGATCGATGTGCGCGGCCTGCTGAGA |
| | AQQAEVRALDGVSKE | AATGCCAGATGGCGGACAATCGCCCCTAAGGA |
| | TARTQLCADFGLDPK | CATCAGCCTGAACGCACTGCTGGACCTGTTCA |
| | RLPWDKMSSNTTFISE | CCGGCGATCCTGTGATTGACGTGCGGCGGAAC |
| | ALLSNSVSRDQVFFTP | ATCGTGACCTTCACCTACACACTGGACGCCTG |
| | APKKGAKKKAPVEV | CGGCACCTACGCCAGAAAGTGGACACTGAAG |
| | MRKDRTWARAYKPR | GGCAAGCAGACCAAGGCCACTCTGGACAAGC |
| | LSVEAQKLKNEALW | TGACCGCCACACAGACAGTGGCCCTGGTGGCT |
| | ALKRTSPEYLKLSRR | ATTGATCTGGGCCAGACAAACCCTATCAGCGC |
| | KEELCRRSINYVIEKT | CGGCATCAGCAGAGTGACCCAAGAAAATGGC |
| | RRRTQCQIVIPVIEDL | GCCCTGCAGTGCGAGCCCCTGGACAGATTCAC |
| | NVRFFHGSGKRLPGW | ACTGCCCGACGACCTGCTGAAGGACATCTCCG |
| | DNFFTAKKENRWFIQ | CCTATAGAATCGCCTGGGACCGCAATGAAGAG |
| | GLHKAFSDLRTHRSF | GAACTGAGAGCCAGAAGCGTGGAAGCCCTGC |
| | YVFEVRPERTSITCPK | CTGAAGCACAGCAGGCTGAAGTGCGAGCACT |
| | CGHCEVGNRDGEAFQ | GGACGGGGTGTCCAAAGAGACAGCCAGAACT |
| | CLSCGKTCNADLDVA | CAGCTGTGCGCCGACTTTGGACTGGACCCCAA |
| | THNLTQVALTGKTMP | AAGACTGCCCTGGGACAAGATGAGCAGCAAC |
| | KREEPRDAQGTAPAR | ACCACCTTCATCAGCGAGGCCCTGCTGAGCAA |
| | KTKKASKSKAPPAER | TAGCGTGTCCAGAGATCAGGTGTTCTTCACCC |
| | EDQTPAQEPSQTS | CTGCTCCAAAGAAGGGCGCCAAGAAGAAAGC |
| | (SEQ ID NO: 2) | CCCTGTCGAAGTGATGCGGAAGGACCGGACAT |
| | | GGGCCAGAGCTTACAAGCCCAGACTGTCCGTG |
| | | GAAGCTCAGAAGCTGAAGAACGAAGCCCTGT |
| | | GGGCCCTGAAGAGAACAAGCCCCGAGTACCT |
| | | GAAGCTGAGCCGGCGGAAAGAAGAACTCTGC |
| | | CGGCGGAGCATCAACTACGTGATCGAGAAAA |
| | | CCCGGCGGAGAACCCAGTGCCAGATCGTGATT |
| | | CCTGTGATCGAGGACCTGAACGTGCGGTTCTT |
| | | TCACGGCAGCGGCAAGAGACTGCCCGGCTGG |
| | | GATAATTTCTTCACCGCCAAAAAAGAAAACCG |
| | | GTGGTTCATCCAGGGCCTGCACAAGGCCTTCA |
| | | GCGACCTGAGAACCCACCGGTCCTTTTACGTG |
| | | TTCGAAGTGCGGCCCGAGCGGACCAGCATCAC |
| | | CTGTCCTAAATGCGGCCACTGCGAAGTGGGCA |
| | | ACAGAGATGGCGAGGCCTTCCAGTGTCTGAGC |
| | | TGTGGCAAGACCTGCAACGCCGACCTGGATGT |
| | | GGCCACTCACAATCTGACACAGGTGGCCCTGA |
| | | CCGGCAAGACCATGCCTAAGAGAGAGGAACC |
| | | TAGGGACGCCCAGGGTACAGCCCCTGCCAGAA |
| | | AGACAAAGAAAGCCAGCAAGAGCAAGGCCCC |
| | | TCCTGCCGAGAGAGAAGATCAGACCCCAGCTC |
| | | AAGAGCCCAGCCAGACATCT (SEQ ID NO: 1405) |
| CasΦ.4 | MEKEITELTKIRREFP | ATGGAAAAAGAGATCACCGAGCTGACCAAGA |
| | NKKFSSTDMKKAGKL | TCCGCAGAGAGTTCCCCAACAAGAAGTTCAGC |
| | LKAEGPDAVRDFLNS | AGCACCGACATGAAGAAGGCCGGCAAGCTGC |
| | CQEIIGDFKPPVKTNI | TGAAGGCCGAAGGACCTGATGCCGTGCGGGA |
| | VSISRPFEEWPVSMVG | CTTCCTGAACAGCTGCCAAGAGATCATCGGCG |
| | RAIQEYYFSLTKEELE | ACTTCAAGCCTCCAGTCAAGACCAACATCGTG |
| | SVHPGTSSEDHKSFFN | TCCATCAGCAGACCCTTCGAGGAATGGCCCGT |
| | ITGLSNYNYTSVQGL | GTCCATGGTTGGACGGGCCATCCAAGAGTACT |
| | NLIFKNAKAIYDGTLV | ACTTCAGCCTGACCAAAGAGGAACTGGAAAG |
| | KANNKNKKLEKKEN | CGTTCACCCCGGCACCAGCAGCGAGGACCACA |
| | EINHKRSLEGLPIITPD | AGAGCTTTTTCAACATCACCGGCCTGAGCAAC |
| | FEEPFDENGHLNNPPG | TACAACTACACCAGCGTGCAGGGCCTGAACCT |
| | INRNIYGYQGCAAKV | GATCTTCAAGAACGCCAAGGCCATCTACGACG |
| | FVPSKHKMVSLPKEY | GCACCCTGGTCAAGGCCAACAACAAGAACAA |
| | EGYNRDPNLSLAGFR | GAAGCTCGAGAAGAAGTTTAACGAGATCAAC |
| | NRLEIPEGEPGHVPWF | CACAAGCGGAGCCTGGAAGGCCTGCCTATCAT |
| | QRMDIPEGQIGHVNKI | CACCCCTGATTTCGAGGAACCCTTCGACGAGA |
| | QRFNFVHGKNSGKVK | ACGGCCACCTGAACAACCCTCCAGGCATCAAC |
| | FSDKTGRVKRYHHSK | CGGAACATCTACGGCTATCAGGGCTGCGCCGC |
| | YKDATKPYKFLEESK | CAAGGTGTTCGTGCCTTCTAAGCACAAGATGG |
| | KVSALDSILAHITIGDD | TGTCCCTGCCTAAAGAGTACGAGGGCTACAAC |
| | WVVFDIRGLYRNVFY | AGGGACCCCAACCTGTCTCTGGCCGGCTTCAG |
| | RELAQKGLTAVQLLD | AAACAGACTGGAAATCCCTGAGGGCGAGCCT |
| | LFTGDPVIDPKKGVV | GGCCATGTGCCATGGTTCCAGAGAATGGATAT |
| | TFSYKEGVVPVFSQKI | CCCCGAGGGCCAGATCGGACACGTGAACAAG |
| | VPRFKSRDTLEKLTSQ | ATCCAGCGGTTCAACTTCGTGCACGGCAAGAA |
| | GPVALLSVDLGQNEP | CAGCGGCAAAGTGAAGTTCTCCGACAAGACCG |
| | VAARVCSLKNINDKIT | GCAGAGTGAAGAGATACCACCACAGCAAGTA |
| | LDNSCRISFLDDYKK | CAAGGACGCTACCAAGCCTTACAAGTTCCTGG |
| | QIKDYRDSLDELEIKI | AAGAGTCCAAGAAGGTGTCAGCCCTGGACAG |
| | RLEAINSLETNQQVEI | CATCCTGGCCATCATCACAATCGGCGACGACT |
| | RDLDVFSADRAKANT | GGGTCGTGTTCGACATCAGAGGCCTGTACCGG |
| | VDMFDIDPNLISWDS | AACGTGTTCTACAGAGAGCTGGCCCAGAAAGG |
| | MSDARVSTQISDLYL | CCTGACAGCTGTGCAACTGCTGGACCTGTTTA |
| | KNGGDESRVYFEINN | CCGGCGATCCCGTGATCGACCCCAAGAAAGGC |
| | KRIKRSDYNISQLVRP | GTGGTCACCTTCAGCTACAAAGAGGGCGTCGT |
| | KLSDSTRKNLNDSIW | CCCCGTCTTTAGCCAGAAAATCGTGCCCCGGT |
| | KLKRTSEEYLKLSKR | TCAAGAGCCGGGACACCCTGGAAAAGCTGAC |
| | KLELSRAVVNYTIRQS | CTCTCAGGGACCTGTGGCTCTGCTGTCTGTGG |
| | KLLSGINDIVIILEDLD | ACCTGGGACAGAATGAACCTGTGGCCGCCAGA |
| | VKKKFNGRGIRDIGW | GTGTGCAGCCTGAAGAACATCAACGACAAGAT |
| | DNFFSSRKENRWFIPA | CACCCTGGACAACTCTTGCCGGATCAGCTTCC |
| | FHKAFSELSSNRGLCV | TGGACGACTACAAGAAGCAGATCAAGGACTA |
| | LEVNPAWTSATCPDC | CAGAGACAGCCTGGACGAGCTGGAAATCAAG |
| | GFCSKENRDGINFTCR | ATCCGGCTGGAAGCCATCAACTCCCTCGAGAC |
| | KCGVSYHADIDVATL | AAACCAGCAGGTCGAGATCAGAGATCTGGAC |
| | NIARVAVLGKPMSGP | GTGTTCAGCGCCGACCGGGCCAAAGCCAATAC |
| | ADRERLGDTKKPRVA | CGTGGACATGTTTGACATCGACCCTAACCTGA |
| | RSRKTMKRKDISNST | TCAGCTGGGACTCCATGAGCGACGCCAGAGTC |
| | VEAMVTA (SEQ ID | AGCACCCAGATCAGCGACCTGTACCTGAAGAA |
| | NO: 4) | TGGCGGCGACGAGAGCCGGGTGTACTTTGAGA |
| | | TTAACAACAAACGGATTAAGCGGAGCGACTAC |
| | | AACATCAGCCAGCTCGTGCGGCCCAAGCTGAG |
| | | CGATAGCACCAGAAAGAACCTGAACGACAGC |
| | | ATCTGGAAGCTGAAGCGGACCAGCGAGGAAT |
| | | ACCTGAAGCTGAGCAAGCGGAAGCTGGAACT |
| | | GAGCAGAGCCGTCGTGAATTACACCATCCGGC |
| | | AGAGCAAACTGCTGAGCGGCATCAATGACATC |
| | | GTGATCATTCTCGAGGACCTGGACGTGAAGAA |
| | | GAAATTCAACGGCAGAGGCATCCGCGATATCG |
| | | GCTGGGACAACTTCTTCAGCTCCCGGAAAGAA |
| | | AACCGGTGGTTCATCCCCGCCTTCCACAAGGC |
| | | CTTTAGCGAGCTGAGCAGCAACAGGGGCCTGT |
| | | GCGTGATCGAAGTGAATCCTGCCTGGACCAGC |
| | | GCCACCTGTCCTGATTGTGGCTTCTGCAGCAA |
| | | AGAAAACAGAGATGGCATCAACTTCACGTGCC |
| | | GGAAGTGCGGCGTGTCCTACCACGCCGATATT |
| | | GACGTGGCCACACTGAATATTGCCAGAGTGGC |
| | | CGTGCTGGGCAAGCCTATGTCTGGACCTGCCG |
| | | ACAGAGAGAGACTGGGCGACACCAAGAAACC |
| | | TAGAGTGGCCCGCAGCAGAAAGACCATGAAG |
| | | CGGAAGGACATCAGCAACAGCACCGTCGAGG |
| | | CCATGGTTACAGCT (SEQ ID NO: 1406) |
| CasΦ.11 | MSNTAVSTREHMSNK | ATGAGCAACACCGCCGTGTCCACCAGAGAACA |
| | TTPPSPLSLLLRAHFP | CATGTCCAACAAGACAACCCCTCCATCTCCTC |
| | GLKFESQDYKIAGKK | TGAGCCTGCTGCTGAGAGCCCACTTTCCTGGC |
| | LRDGGPEAVISYLTG | CTGAAGTTCGAGAGCCAGGACTACAAGATCGC |
| | KGQAKLKDVKPPAK | CGGCAAGAAACTGAGAGATGGCGGACCTGAG |
| | AFVIAQSRPFIEWDLV | GCCGTGATCAGCTACCTGACTGGAAAAGGCCA |
| | RVSRQIQEKIFGIPATK | GGCCAAGCTGAAGGACGTGAAGCCTCCTGCCA |
| | GRPKQDGLSETAFNE | AGGCCTTTGTGATCGCCCAGAGCAGACCCTTC |
| | AVASLEVDGKSKLNE | ATCGAGTGGGACCTCGTCAGAGTGTCCCGGCA |
| | ETRAAFYEVLGLDAP | GATCCAAGAGAAGATCTTTGGCATCCCCGCCA |
| | SLHAQAQNALIKSAIS | CCAAGGGCAGACCTAAGCAAGATGGCCTGAG |
| | IREGVLKKVENRNEK | CGAGACAGCCTTCAACGAAGCCGTGGCCAGCC |
| | NLSKTKRRKEAGEEA | TGGAAGTGGACGGCAAGAGCAAGCTGAACGA |
| | TFVEEKAHDERGYLI | GGAAACCAGAGCCGCCTTCTACGAGGTGCTGG |
| | HPPGVNQTIPGYQAV | GACTTGATGCCCCAAGCCTGCATGCTCAGGCC |
| | VIKSCPSDFIGLPSGCL | CAGAATGCCCTGATCAAGAGCGCCATCAGCAT |
| | AKESAEALTDYLPHD | CAGAGAAGGCGTGCTGAAGAAGGTGGAAAAC |
| | RMTIPKGQPGYVPEW | CGGAACGAGAAGAACCTGAGCAAGACCAAGC |
| | QHPLLNRRKNRRRRD | GGCGGAAAGAGGCTGGCGAAGAGGCCACCTT |
| | WYSASLNKPKATCSK | TGTGGAAGAGAAGGCCCACGACGAGCGGGGC |
| | RSGTPNRKNSRTDQIQ | TATCTGATTCATCCTCCTGGCGTGAACCAGAC |
| | SGRFKGAIPVLMRFQ | AATCCCCGGCTATCAGGCCGTGGTCATCAAGA |
| | DEWVIIDIRGLLRNAR | GCTGCCCCAGCGATTTCATCGGCCTGCCTAGT |
| | YRKLLKEKSTIPDLLS | GGCTGTCTGGCCAAAGAGTCTGCCGAGGCTCT |
| | LFTGDPSIDMRQGVC | GACCGATTACCTGCCTCACGACCGGATGACTA |
| | TFIYKAGQACSAKMV | TCCCCAAGGGACAGCCTGGCTATGTGCCCGAA |
| | KTKNAPEILSELTKSG | TGGCAGCACCCTCTGCTGAACAGAAGAAAGA |
| | PVVLVSIDLGQTNPIA | ACCGGCGCAGAAGAGACTGGTACAGCGCCAG |
| | AKVSRVTQLSDGQLS | CCTGAACAAGCCCAAGGCCACCTGTAGCAAGA |
| | HETLLRELLSNDSSDG | GATCCGGCACACCCAACCGGAAGAACAGCAG |
| | KEIARYRVASDRLRD | AACCGACCAGATCCAGAGCGGCAGATTCAAG |
| | KLANLAVERLSPEHK | GGCGCCATTCCTGTGCTGATGCGGTTCCAGGA |
| | SEILRAKNDTPALCKA | TGAGTGGGTCATCATCGACATCCGGGGCCTGC |
| | RVCAALGLNPEMIAW | TGAGAAACGCCCGGTATCGGAAGCTGCTGAAA |
| | DKMTPYTEFLATAYL | GAGAAGTCCACCATTCCTGACCTGCTGAGCCT |
| | EKGGDRKVATLKPKN | GTTCACCGGCGATCCCAGCATCGATATGAGAC |
| | RPEMLRRDIKFKGTE | AGGGCGTGTGCACCTTCATCTACAAGGCCGGC |
| | GVRIEVSPEAAEAYRE | CAGGCCTGTAGCGCCAAGATGGTCAAGACAA |
| | AQWDLQRTSPEYLRL | AGAACGCCCCTGAGATCCTGTCCGAGCTGACC |
| | STWKQELTKRILNQL | AAGTCTGGACCTGTGGTGCTGGTGTCCATCGA |
| | RHKAAKSSQCEVVV | CCTGGGCCAGACAAATCCTATCGCCGCCAAGG |
| | MAFEDLNIKMMHGN | TGTCCAGAGTGACCCAGCTGTCTGATGGCCAG |
| | GKWADGGWDAFFIK | CTGAGCCACGAGACACTGCTGAGGGAACTGCT |
| | KRENRWFMQAFHKS | GAGCAACGATAGCAGCGACGGCAAAGAGATC |
| | LTELGAHKGVPTIEVT | GCCCGGTACAGAGTGGCCAGCGACAGACTGA |
| | PHRTSITCTKCGHCDK | GAGACAAGCTGGCCAATCTGGCCGTGGAAAG |
| | ANRDGERFACQKCGF | ACTGAGCCCTGAGCACAAGAGCGAGATCCTGA |
| | VAHADLEIATDNIERV | GAGCCAAGAACGACACCCCTGCTCTGTGCAAG |
| | ALTGKPMPKPESERS | GCCAGAGTGTGTGCTGCCCTGGGACTGAACCC |
| | GDAKKSVGARKAAF | TGAAATGATCGCCTGGGACAAGATGACCCCTT |
| | KPEEDAEAAE (SEQ | ACACCGAGTTTCTGGCCACCGCCTACCTGGAA |
| | ID NO: 2468) | AAAGGCGGCGACAGAAAAGTGGCCACACTGA |
| | | AGCCCAAGAACAGACCCGAGATGCTGCGGCG |
| | | GGACATCAAGTTCAAGGGAACCGAGGGCGTC |
| | | AGAATCGAGGTGTCACCTGAAGCCGCCGAGGC |
| | | CTATAGAGAAGCCCAGTGGGATCTGCAGAGG |
| | | ACAAGCCCCGAGTACCTGAGACTGTCCACCTG |
| | | GAAGCAAGAGCTGACAAAGAGAATCCTGAAC |
| | | CAGCTGCGGCACAAGGCCGCCAAAAGCAGCC |
| | | AGTGTGAAGTGGTGGTCATGGCCTTCGAGGAC |
| | | CTGAACATCAAGATGATGCACGGCAACGGCA |
| | | AGTGGGCCGATGGTGGATGGGATGCCTTCTTC |
| | | ATCAAGAAACGCGAGAACCGGTGGTTCATGCA |
| | | GGCCTTCCACAAGAGCCTGACAGAGCTGGGAG |
| | | CACACAAGGGCGTGCCAACCATCGAAGTGACC |
| | | CCTCACAGAACCAGCATCACCTGTACCAAGTG |
| | | CGGCCACTGCGACAAGGCCAACAGAGATGGG |
| | | GAGAGATTCGCCTGCCAGAAATGCGGCTTTGT |
| | | GGCCCACGCCGATCTGGAAATCGCCACCGACA |
| | | ACATCGAGAGAGTGGCCCTGACAGGCAAGCC |
| | | CATGCCTAAGCCTGAGAGCGAGAGAAGCGGC |
| | | GACGCCAAGAAATCTGTGGGAGCCAGAAAGG |
| | | CCGCCTTCAAGCCTGAGGAAGATGCCGAAGCT |
| | | GCCGAG (SEQ ID NO: 1407) |
| CasΦ.12 | MIKPTVSQFLTPGFKL | ATGATCAAGCCTACCGTCAGCCAGTTTCTGAC |
| | IRNHSRTAGLKLKNE | CCCTGGCTTCAAGCTGATCCGGAACCACTCTA |
| | GEEACKKFVRENEIPK | GAACAGCCGGCCTGAAGCTGAAGAACGAGGG |
| | DECPNFQGGPAIANII | CGAAGAGGCCTGCAAGAAATTCGTGCGCGAG |
| | AKSREFTEWEIYQSSL | AACGAGATCCCCAAGGACGAGTGCCCCAACTT |
| | AIQEVIFTLPKDKLPEP | TCAAGGCGGACCCGCCATTGCCAACATCATTG |
| | ILKEEWRAQWLSEHG | CCAAGAGCCGCGAGTTCACCGAGTGGGAGATC |
| | LDTVPYKEAAGLNLII | TACCAGTCTAGCCTGGCCATCCAAGAAGTGAT |
| | KNAVNTYKGVQVKV | CTTCACCCTGCCTAAGGACAAGCTGCCCGAGC |
| | DNKNKNNLAKINRKN | CTATCCTGAAAGAGGAATGGCGAGCCCAGTGG |
| | EIAKLNGEQEISFEEIK | CTGTCTGAGCACGGACTGGATACCGTGCCTTA |
| | AFDDKGYLLQKPSPN | CAAAGAAGCCGCCGGACTGAACCTGATCATCA |
| | KSIYCYQSVSPKPFITS | AGAACGCCGTGAACACCTACAAGGGCGTGCA |
| | KYHNVNLPEEYIGYY | AGTGAAGGTGGACAACAAGAACAAAAACAAC |
| | RKSNEPIVSPYQFDRL | CTGGCCAAGATCAACCGGAAGAATGAGATCG |
| | RIPIGEPGYVPKWQYT | CCAAGCTGAACGGCGAGCAAGAGATCAGCTTC |
| | FLSKKENKRRKLSKRI | GAGGAAATCAAGGCCTTCGACGACAAGGGCT |
| | KNVSPILGIICIKKDW | ACCTGCTGCAGAAGCCCTCTCCAAACAAGAGC |
| | CVFDMRGLLRTNHW | ATCTACTGCTACCAGAGCGTGTCCCCTAAGCC |
| | KKYHKPTDSINDLFD | TTTCATCACCAGCAAGTACCACAACGTGAACC |
| | YFTGDPVIDTKANVV | TGCCTGAAGAGTACATCGGCTACTACCGGAAG |
| | RFRYKMENGIVNYKP | TCCAACGAGCCCATCGTGTCCCCATACCAGTT |
| | VREKKGKELLENICD | CGACAGACTGCGGATCCCTATCGGCGAGCCTG |
| | QNGSCKLATVDVGQ | GCTATGTGCCTAAGTGGCAGTACACCTTCCTG |
| | NNPVAIGLFELKKVN | AGCAAGAAAGAGAACAAGCGGCGGAAGCTGA |
| | GELTKTLISRHPTPIDF | GCAAGCGGATCAAGAATGTGTCCCCAATCCTG |
| | CNKITAYRERYDKLE | GGCATCATCTGCATCAAGAAAGATTGGTGCGT |
| | SSIKLDAIKQLTSEQKI | GTTCGACATGCGGGGCCTGCTGAGAACAAACC |
| | EVDNYNNNFTPQNTK | ACTGGAAGAAGTATCACAAGCCCACCGACAG |
| | QIVCSKLNINPNDLPW | CATCAACGACCTGTTCGACTACTTCACCGGCG |
| | DKMISGTHFISEKAQV | ATCCCGTGATCGACACCAAGGCCAATGTCGTG |
| | SNKSEIYFTSTDKGKT | CGGTTCCGGTACAAGATGGAAAACGGCATCGT |
| | KDVMKSDYKWFQDY | GAACTACAAGCCCGTGCGGGAAAAGAAGGGC |
| | KPKLSKEVRDALSDIE | AAAGAGCTGCTGGAAAACATCTGCGACCAGA |
| | WRLRRESLEFNKLSK | ACGGCAGCTGCAAGCTGGCCACAGTGGATGTG |
| | SREQDARQLANWISS | GGCCAGAACAACCCTGTGGCCATCGGCCTGTT |
| | MCDVIGIENLVKKNN | CGAGCTGAAAAAAGTGAACGGGGAGCTGACC |
| | FFGGSGKREPGWDNF | AAGACACTGATCAGCAGACACCCCACACCTAT |
| | YKPKKENRWWINAIH | CGATTTCTGCAACAAGATCACCGCCTACCGCG |
| | KALTELSQNKGKRVI | AGAGATACGACAAGCTGGAAAGCAGCATCAA |
| | LLPAMRTSITCPKCKY | GCTGGACGCCATCAAGCAGCTGACCAGCGAGC |
| | CDSKNRNGEKFNCLK | AGAAAATCGAAGTGGACAACTACAACAACAA |
| | CGIELNADIDVATENL | CTTCACGCCCCAGAACACCAAGCAGATCGTGT |
| | ATVAITAQSMPKPTC | GCAGCAAGCTGAATATCAACCCCAACGATCTG |
| | ERSGDAKKPVRARKA | CCCTGGGACAAGATGATCAGCGGCACCCACTT |
| | KAPEFHDKLAPSYTV | CATCAGCGAGAAGGCCCAGGTGTCCAACAAG |
| | VLREAV (SEQ ID NO: | AGCGAGATCTACTTTACCAGCACCGATAAGGG |
| | 12) | CAAGACCAAGGACGTGATGAAGTCCGACTAC |
| | | AAGTGGTTCCAGGACTATAAGCCCAAGCTGTC |
| | | CAAAGAAGTGCGGGACGCCCTGAGCGATATTG |
| | | AGTGGCGGCTGAGAAGAGAGAGCCTGGAATT |
| | | CAACAAGCTCAGCAAGAGCAGAGAGCAGGAC |
| | | GCCAGACAGCTGGCCAATTGGATCAGCAGCAT |
| | | GTGCGACGTGATCGGCATCGAGAACCTGGTCA |
| | | AGAAGAACAACTTCTTCGGCGGCAGCGGCAA |
| | | GAGAGAACCCGGCTGGGACAACTTCTACAAGC |
| | | CGAAGAAAGAAAACCGGTGGTGGATCAACGC |
| | | CATCCACAAGGCCCTGACAGAGCTGTCCCAGA |
| | | ACAAGGGAAAGAGAGTGATCCTGCTGCCTGCC |
| | | ATGCGGACCAGCATCACCTGTCCTAAGTGCAA |
| | | GTACTGCGACAGCAAGAACCGCAACGGCGAG |
| | | AAGTTCAATTGCCTGAAGTGTGGCATTGAGCT |
| | | GAACGCCGACATCGACGTGGCCACCGAAAATC |
| | | TGGCTACCGTGGCCATCACAGCCCAGAGCATG |
| | | CCTAAGCCAACCTGCGAGAGAAGCGGCGACG |
| | | CCAAGAAACCTGTGCGGGCCAGAAAAGCCAA |
| | | GGCTCCCGAGTTCCACGATAAGCTGGCCCCTA |
| | | GCTACACCGTGGTGCTGAGAGAAGCTGTG |
| | | (SEQ ID NO: 1408) |
| CasΦ.17 | MYSLEMADLKSEPSL | ATGTACAGCCTGGAAATGGCCGACCTGAAGTC |
| | LAKLLRDRFPGKYWL | CGAGCCTTCTCTGCTGGCTAAGCTGCTGAGAG |
| | PKYWKLAEKKRLTG | ACAGATTCCCCGGCAAGTACTGGCTGCCTAAG |
| | GEEAACEYMADKQL | TACTGGAAGCTGGCCGAGAAGAAGAGACTGA |
| | DSPPPNFRPPARCVIL | CAGGCGGAGAAGAAGCCGCCTGCGAGTACAT |
| | AKSRPFEDWPVHRVA | GGCTGACAAGCAGCTGGATAGCCCTCCACCTA |
| | SKAQSFVIGLSEQGFA | ACTTCCGGCCTCCAGCCAGATGTGTGATCCTG |
| | ALRAAPPSTADARRD | GCCAAGAGCAGACCCTTCGAGGATTGGCCAGT |
| | WLRSHGASEDDLMA | GCACAGAGTGGCCAGCAAGGCCCAGTCTTTTG |
| | LEAQLLETIMGNAISL | TGATCGGCCTGAGCGAGCAGGGCTTCGCTGCT |
| | HGGVLKKIDNANVK | CTTAGAGCTGCCCCTCCTAGCACAGCCGACGC |
| | AAKRLSGRNEARLNK | CAGAAGAGATTGGCTGAGAAGCCATGGCGCC |
| | GLQELPPEQEGSAYG | AGCGAGGATGATCTGATGGCTCTGGAAGCCCA |
| | ADGLLVNPPGLNLNI | GCTGCTGGAAACCATCATGGGCAACGCCATTT |
| | YCRKSCCPKPVKNTA | CTCTGCACGGCGGCGTGCTGAAGAAGATCGAC |
| | RFVGHYPGYLRDSDSI | AACGCCAACGTGAAGGCCGCCAAGAGACTGT |
| | LISGTMDRLTIIEGMP | CCGGAAGAAACGAGGCCAGACTGAACAAGGG |
| | GHIPAWQREQGLVKP | CCTGCAAGAGCTGCCTCCTGAGCAAGAGGGAT |
| | GGRRRRLSGSESNMR | CTGCCTATGGCGCCGATGGCCTGCTGGTTAAT |
| | QKVDPSTGPRRSTRS | CCTCCTGGCCTGAACCTGAACATCTACTGCAG |
| | GTVNRSNQRTGRNGD | AAAGAGCTGCTGCCCCAAGCCTGTGAAGAACA |
| | PLLVEIRMKEDWVLL | CCGCCAGATTCGTGGGACACTACCCCGGCTAC |
| | DARGLLRNLRWRESK | CTGAGAGACTCCGACAGCATCCTGATCAGCGG |
| | RGLSCDHEDLSLSGLL | CACCATGGACCGGCTGACAATCATCGAGGGAA |
| | ALFSGDPVIDPVRNEV | TGCCCGGACACATCCCCGCCTGGCAACGAGAA |
| | VFLYGEGIIPVRSTKP | CAGGGACTTGTGAAACCTGGCGGCAGAAGGC |
| | VGTRQSKKLLERQAS | GGAGACTGTCTGGCAGCGAGAGCAACATGAG |
| | MGPLTLISCDLGQTNL | ACAGAAGGTGGACCCCAGCACAGGCCCCAGA |
| | IAGRASAISLTHGSLG | AGAAGCACAAGATCCGGCACCGTGAACAGAA |
| | VRSSVRIELDPELIKSF | GCAACCAGCGGACAGGCAGAAACGGCGATCC |
| | ERLRKDADRLETEILT | TCTGCTGGTGGAAATCCGGATGAAGGAAGATT |
| | AAKETLSDEQRGEVN | GGGTCCTGCTGGACGCCAGAGGCCTGCTGAGA |
| | SHEKDSPQTAKASLC | AATCTGAGATGGCGCGAGTCCAAGAGAGGCCT |
| | RELGLHPPSLPWGQM | GAGCTGCGATCACGAGGATCTGAGCCTGTCTG |
| | GPSTTFIADMLISHGR | GACTGCTGGCCCTGTTTTCTGGCGACCCCGTG |
| | DDDAFLSHGEFPTLE | ATCGATCCTGTGCGGAATGAGGTGGTGTTCCT |
| | KRKKFDKRFCLESRP | GTACGGCGAGGGCATCATTCCAGTGCGGAGCA |
| | LLSSETRKALNESLW | CAAAGCCTGTGGGCACCAGACAGAGCAAGAA |
| | EVKRTSSEYARLSQR | ACTGCTGGAACGGCAGGCCAGCATGGGCCCTC |
| | KKEMARRAVNFVVEI | TGACACTGATCTCTTGTGACCTGGGCCAGACC |
| | SRRKTGLSNVIVNIED | AACCTGATTGCCGGCAGAGCCTCTGCTATCAG |
| | LNVRIFHGGGKQAPG | CCTGACACATGGATCTCTGGGCGTCAGATCCA |
| | WDGFFRPKSENRWFI | GCGTGCGGATTGAGCTGGACCCCGAGATCATC |
| | QAIHKAFSDLAAHHG | AAGAGCTTCGAGCGGCTGAGAAAGGACGCCG |
| | IPVIESDPORTSMTCPE | ACAGACTGGAAACCGAGATCCTGACCGCCGCC |
| | CGHCDSKNRNGVRFL | AAAGAAACCCTGAGCGACGAACAGAGGGGCG |
| | CKGCGASMDADFDA | AAGTGAACAGCCACGAGAAGGATAGCCCACA |
| | ACRNLERVALTGKPM | GACAGCCAAGGCCAGCCTGTGTAGAGAGCTG |
| | PKPSTSCERLLSATTG | GGACTGCACCCTCCATCTCTGCCTTGGGGACA |
| | KVCSDHSLSHDAIEK | GATGGGCCCTAGCACCACCTTTATCGCCGACA |
| | AS (SEQ ID NO: 17) | TGCTGATCTCCCACGGCAGGGACGATGATGCC |
| | | TTTCTGAGCCACGGCGAGTTCCCCACACTGGA |
| | | AAAGCGGAAGAAGTTCGATAAGCGGTTCTGCC |
| | | TGGAAAGCAGACCCCTGCTGAGCAGCGAGAC |
| | | AAGAAAGGCCCTGAACGAGTCCCTGTGGGAA |
| | | GTGAAGAGAACCAGCAGCGAGTACGCCCGGC |
| | | TGAGCCAGAGAAAGAAAGAGATGGCTAGACG |
| | | GGCCGTGAACTTCGTGGTCGAGATCTCCAGAA |
| | | GAAAGACCGGCCTGTCCAACGTGATCGTGAAC |
| | | ATCGAGGACCTGAACGTGCGGATCTTTCACGG |
| | | CGGAGGAAAACAGGCTCCTGGCTGGGATGGCT |
| | | TCTTCAGACCCAAGTCCGAGAACCGGTGGTTC |
| | | ATCCAGGCCATCCACAAGGCCTTCAGCGATCT |
| | | GGCCGCTCACCACGGAATCCCTGTGATCGAGA |
| | | GCGACCCTCAGCGGACCAGCATGACCTGTCCT |
| | | GAGTGTGGCCACTGCGACAGCAAGAACCGGA |
| | | ATGGCGTTCGGTTCCTGTGCAAAGGCTGTGGC |
| | | GCCTCCATGGACGCCGATTTTGATGCCGCCTG |
| | | CCGGAACCTGGAAAGAGTGGCTCTGACAGGC |
| | | AAGCCCATGCCTAAGCCTAGCACCTCCTGTGA |
| | | AAGACTGCTGAGCGCCACCACCGGCAAAGTGT |
| | | GCTCTGATCACTCCCTGTCTCACGACGCCATCG |
| | | AGAAGGCTTCTTAA (SEQ ID NO: 1409) |
| CasΦ.18 | MEKEITELTKIRREFP | ATGGAAAAAGAGATCACCGAGCTGACCAAGA |
| | NKKFSSTDMKKAGKL | TCCGCAGAGAGTTCCCCAACAAGAAGTTCAGC |
| | LKAEGPDAVRDFLNS | AGCACCGACATGAAGAAGGCCGGCAAGCTGC |
| | CQEIIGDFKPPVKTNI | TGAAGGCCGAAGGACCTGATGCCGTGCGGGA |
| | VSISRPFEEWPVSMVG | CTTCCTGAACAGCTGCCAAGAGATCATCGGCG |
| | RAIQEYYFSLTKEELE | ACTTCAAGCCTCCAGTCAAGACCAACATCGTG |
| | SVHPGTSSEDHKSFFN | TCCATCAGCAGACCCTTCGAGGAATGGCCCGT |
| | ITGLSNYNYTSVQGL | GTCCATGGTTGGACGGGCCATCCAAGAGTACT |
| | NLIFKNAKAIYDGTLV | ACTTCAGCCTGACCAAAGAGGAACTGGAAAG |
| | KANNKNKKLEKKFN | CGTTCACCCCGGCACCAGCAGCGAGGACCACA |
| | EINHKRSLEGLPIITPD | AGAGCTTTTTCAACATCACCGGCCTGAGCAAC |
| | FEEPFDENGHLNNPPG | TACAACTACACCAGCGTGCAGGGCCTGAACCT |
| | INRNIYGYQGCAAKV | GATCTTCAAGAACGCCAAGGCCATCTACGACG |
| | FVPSKHKMVSLPKEY | GCACCCTGGTCAAGGCCAACAACAAGAACAA |
| | EGYNRDPNLSLAGFR | GAAGCTCGAGAAGAAGTTTAACGAGATCAAC |
| | NRLEIPEGEPGHVPWF | CACAAGCGGAGCCTGGAAGGCCTGCCTATCAT |
| | QRMDIPEGQIGHVNKI | CACCCCTGATTTCGAGGAACCCTTCGACGAGA |
| | QRFNFVHGKNSGKVK | ACGGCCACCTGAACAACCCTCCAGGCATCAAC |
| | FSDKTGRVKRYHHSK | CGGAACATCTACGGCTATCAGGGCTGCGCCGC |
| | YKDATKPYKFLEESK | CAAGGTGTTCGTGCCTTCTAAGCACAAGATGG |
| | KVSALDSILAIITIGDD | TGTCCCTGCCTAAAGAGTACGAGGGCTACAAC |
| | WVVFDIRGLYRNVFY | AGGGACCCCAACCTGTCTCTGGCCGGCTTCAG |
| | RELAQKGLTAVQLLD | AAACAGACTGGAAATCCCTGAGGGCGAGCCT |
| | LFTGDPVIDPKKGVV | GGCCATGTGCCATGGTTCCAGAGAATGGATAT |
| | TFSYKEGVVPVFSQKI | CCCCGAGGGCCAGATCGGACACGTGAACAAG |
| | VPRFKSRDTLEKLTSQ | ATCCAGCGGTTCAACTTCGTGCACGGCAAGAA |
| | GPVALLSVDLGQNEP | CAGCGGCAAAGTGAAGTTCTCCGACAAGACCG |
| | VAARVCSLKNINDKIT | GCAGAGTGAAGAGATACCACCACAGCAAGTA |
| | LDNSCRISFLDDYKK | CAAGGACGCTACCAAGCCTTACAAGTTCCTGG |
| | QIKDYRDSLDELEIKI | AAGAGTCCAAGAAGGTGTCAGCCCTGGACAG |
| | RLEAINSLETNQQVEI | CATCCTGGCCATCATCACAATCGGCGACGACT |
| | RDLDVFSADRAKANT | GGGTCGTGTTCGACATCAGAGGCCTGTACCGG |
| | VDMFDIDPNLISWDS | AACGTGTTCTACAGAGAGCTGGCCCAGAAAGG |
| | MSDARVSTQISDLYL | CCTGACAGCTGTGCAACTGCTGGACCTGTTTA |
| | KNGGDESRVYFEINN | CCGGCGATCCCGTGATCGACCCCAAGAAAGGC |
| | KRIKRSDYNISQLVRP | GTGGTCACCTTCAGCTACAAAGAGGGCGTCGT |
| | KLSDSTRKNLNDSIW | CCCCGTCTTTAGCCAGAAAATCGTGCCCCGGT |
| | KLKRTSEEYLKLSKR | TCAAGAGCCGGGACACCCTGGAAAAGCTGAC |
| | KLELSRAVVNYTIRQS | CTCTCAGGGACCTGTGGCTCTGCTGTCTGTGG |
| | KLLSGINDIVIILEDLD | ACCTGGGACAGAATGAACCTGTGGCCGCCAGA |
| | VKKKFNGRGIRDIGW | GTGTGCAGCCTGAAGAACATCAACGACAAGAT |
| | DNFFSSRKENRWFIPA | CACCCTGGACAACTCTTGCCGGATCAGCTTCC |
| | FHKTFSELSSNRGLCV | TGGACGACTACAAGAAGCAGATCAAGGACTA |
| | IEVNPAWTSATCPDC | CAGAGACAGCCTGGACGAGCTGGAAATCAAG |
| | GFCSKENRDGINFTCR | ATCCGGCTGGAAGCCATCAACTCCCTCGAGAC |
| | KCGVSYHADIDVATL | AAACCAGCAGGTCGAGATCAGAGATCTGGAC |
| | NIARVAVLGKPMSGP | GTGTTCAGCGCCGACCGGGCCAAAGCCAATAC |
| | ADRERLGDTKKPRVA | CGTGGACATGTTTGACATCGACCCTAACCTGA |
| | RSRKTMKRKDISNST | TCAGCTGGGACTCCATGAGCGACGCCAGAGTC |
| | VEAMVTA (SEQ ID | AGCACCCAGATCAGCGACCTGTACCTGAAGAA |
| | NO: 18) | TGGCGGCGACGAGAGCCGGGTGTACTTTGAGA |
| | | TTAACAACAAACGGATTAAGCGGAGCGACTAC |
| | | AACATCAGCCAGCTCGTGCGGCCCAAGCTGAG |
| | | CGATAGCACCAGAAAGAACCTGAACGACAGC |
| | | ATCTGGAAGCTGAAGCGGACCAGCGAGGAAT |
| | | ACCTGAAGCTGAGCAAGCGGAAGCTGGAACT |
| | | GAGCAGAGCCGTCGTGAATTACACCATCCGGC |
| | | AGAGCAAACTGCTGAGCGGCATCAATGACATC |
| | | GTGATCATTCTCGAGGACCTGGACGTGAAGAA |
| | | GAAATTCAACGGCAGAGGCATCCGCGATATCG |
| | | GCTGGGACAACTTCTTCAGCTCCCGGAAAGAA |
| | | AACCGGTGGTTCATCCCCGCCTTCCACAAGAC |
| | | CTTTAGCGAGCTGAGCAGCAACAGGGGCCTGT |
| | | GCGTGATCGAAGTGAATCCTGCCTGGACCAGC |
| | | GCCACCTGTCCTGATTGTGGCTTCTGCAGCAA |
| | | AGAAAACAGAGATGGCATCAACTTCACGTGCC |
| | | GGAAGTGCGGCGTGTCCTACCACGCCGATATT |
| | | GACGTGGCCACACTGAATATTGCCAGAGTGGC |
| | | CGTGCTGGGCAAGCCTATGTCTGGACCTGCCG |
| | | ACAGAGAGAGACTGGGCGACACCAAGAAACC |
| | | TAGAGTGGCCCGCAGCAGAAAGACCATGAAG |
| | | CGGAAGGACATCAGCAACAGCACCGTCGAGG |
| | | CCATGGTTACAGCTTAA (SEQ ID NO: 1410) |

### Example 2

### Illustrative CasΦ Guide RNA Sequences

[0429] Guide RNA sequences for complexing with the CasΦ polypeptides of the disclosure were prepared. TABLE 5 provides illustrative guide RNA sequences to target the target nucleic acid sequence TATTAAATACTCGTATTGCTGTTCGATTAT (SEQ ID NO: 1411). A guide nucleic acid of the disclosure can comprise the sequence of any of the guide RNAs provided in Table 5 or a portion thereof.

TABLE 5
Illustrative CasΦ guide RNA sequences

| | RNA | Repeat | Spacer | RNA sequence (5′ → 3′), shown as DNA |
|---|---|---|---|---|
| Name | Type | length | length | BOLD = spacer |
| CasΦ.2 | crRNA | 36 | 30 | GTCGGAACGCTCAACGATTGCCCCTCACGAGG |
| | | | | GGAC (SEQ ID NO: 49) |
| CasΦ.7 | crRNA | 36 | 30 | GGATCCAATCCTTTTTGATTGCCCAATTCGTTG |
| | | | | GGAC (SEQ ID NO: 51) |
| CasΦ.10 | crRNA | 36 | 30 | GGATCTGAGGATCATTATTGCTCGTTACGACGA |
| | | | | GAC (SEQ ID NO: 52) |
| CasΦ.18 | crRNA | 36 | 30 | ACCAAAACGACTATTGATTGCCCAGTACGCTGG |
| | | | | GAC (SEQ ID NO: 57) |

### Example 3

### CasΦ Acts as a Programmable Nickase

[0430] The present example shows that a CasΦ polypeptide can comprise programmable nickase activity. FIG. 1 shows data from an experiment to analyze nicking ability of CasΦ ortholog proteins. For this experiment, five different CasΦ polypeptides: designated CasΦ.2, CasΦ.11, CasΦ.17, CasΦ.18, and CasΦ.12 in FIG. 1, were analyzed. Amino acid sequences of the proteins used in the experiment are shown in TABLE 4.

[0431] All reactions were carried out using guide RNA comprising a crRNA sequence comprising the CasΦ.18 repeat sequence (ACCAAAACGACTATTGATTGCCCAGTACGCTGGGAC (SEQ ID NO: 57)). Complexing of the CasΦ polypeptide with a guide RNA to form the ribonucleoprotein (RNP) complex was carried out at room temperature for 20 minutes. The RNP complex was incubated with the target DNA at 37° C. for 60 minutes in NEB CutSmart buffer (50 mM Potassium Acetate, 20 mM Tris-Acetate, 10 mM Magnesium Acetate, 100 ug/ml BSA, pH 7.9 at 25° C.). The target nucleic acid used for the reactions was a super-coiled plasmid DNA comprising the target sequence TATTAAATACTCGTATTGCTGTTCGATTAT (SEQ ID NO: 116), which was immediately downstream of a TTTN PAM sequence. The plasmid DNA sequence is provided below with the target sequence in bold:

(SEQ ID NO: 1412)
gtgtagataactacgatacgggagggcttaccatctggccccagtgctgc
aatgataccgcgagacccacgctcaccggctccagatttatcagcaataa
accagccagccggaagggccgagcgcagaagtggtcctgcaactttatcc
gcctccatccagtctattaattgttgccgggaagctagagtaagtagttc
gccagttaatagtttgcgcaacgttgttgccattgctacaggcatcgtgg
tgtcacgctcgtcgtttggtatggcttcattcagctccggttcccaacga
tcaaggcgagttacatgatcccccatgttgtgcaaaaaagcggttagctc
cttcggtcctccgatcgttgtcagaagtaagttggccgcagtgttatcac
tcatggttatggcagcactgcataattctcttactgtcatgccatccgta
agatgcttttctgtgactggtgagtactcaaccaagtcattctgagaata
gtgtatgcggcgaccgagttgctcttgcccggcgtcaatacgggataata
ccgcgccacatagcagaactttaaaagtgctcatcattggaaaacgttct
tcggggcgaaaactctcaaggatcttaccgctgttgagatccagttcgat
gtaacccactcgtgcacccaactgatcttcagcatcttttactttcacca
gcgtttctgggtgagcaaaaacaggaaggcaaaatgccgcaaaaaaggga
ataagggcgacacggaaatgttgaatactcatactcttcctttttcaata
ttattgaagcatttatcagggttattgtctcatgagcggatacatatttg
aatgtatttagaaaaataaacaaataggggttccgcgcacatttccccga
aaagtgccacctgacgtctaagaaaccattattatcatgacattaaccta
taaaaataggcgtatcacgaggccctttcgtctcgcgcgtttcggtgatg
acggtgaaaacctctgacacatgcagctcccggagacggtcacagcttgt
ctgccatggacatgtttaTATTAAATACTCGTATTGCTGTTCGATTATga
ccgaattccctgtcgtgccagctgcattaatgaatcggccaacgcgcggg
gagaggcggtttgcgtattgggcgctcttccgcttcctcgctcactgact
cgctgcgctcggtcgttcggctgcggcgagcggtatcagctcactcaaag
gcggtaatacggttatccacagaatcaggggataacgcaggaaagaacat
gtgagcaaaaggccagcaaaaggccaggaaccgtaaaaaggccgcgttgc
tggcgtttttccataggctccgcccccctgacgagcatcacaaaaatcga
cgctcaagtcagaggtggcgaaacccgacaggactataaagataccaggc
gtttccccctggaagctccctcgtgcgctctcctgttccgaccctgccgc
ttaccggatacctgtccgcctttctcccttcgggaagcgtggcgctttct
catagctcacgctgtaggtatctcagttcggtgtaggtcgttcgctccaa
gctgggctgtgtgcacgaaccccccgttcagcccgaccgctgcgccttat
ccggtaactatcgtcttgagtccaacccggtaagacacgacttatcgcca
ctggcagcagccactggtaacaggattagcagagcgaggtatgtaggcgg
tgctacagagttcttgaagtggtggcctaactacggctacactagaagaa
cagtatttggtatctgcgctctgctgaagccagttaccttcggaaaaaga
gttggtagctcttgatccggcaaacaaaccaccgctggtagcggtggttt
ttttgtttgcaagcagcagattacgcgcagaaaaaaaggatctcaagaag
atcctttgatcttttctacggggtctgacgctcagtggaacgaaaactca
cgttaagggattttggtcatgagattatcaaaaaggatcttcacctagat
ccttttaaattaaaaatgaagttttaaatcaatctaaagtatatatgagt
aaacttggtctgacagttaccaatgcttaatcagtgaggcacctatctca
gcgatctgtctatttcgttcatccatagttgcctgactccccgtc

[0432] As shown in FIG. 1, CasΦ.17 and CasΦ.18 produced only nicked product (i.e. single strand breaks; “nicked”) by 60 minutes. By way of comparison, CasΦ.12 generated almost entirely linearized product demonstrating double-stranded breaks, while CasΦ.2 and CasΦ.11 generated some linearized product (i.e. double strand breaks) but primarily produced nicked intermediate. This data demonstrates that CasΦ orthologs can comprise programmable nickase activity.

### Example 4

### Effect of crRNA Repeat Sequence and RNP Complexing Temperature on CasΦ Nickase Activity

[0433] The present example shows that the crRNA repeat sequence and RNP complexing temperature can affect nickase activity of CasΦ. FIG. 2A and FIG. 2B illustrate results of a cis-cleavage experiment showing the percentage of input plasmid DNA that was nicked after 60 minutes of reaction at 37° C. by CasΦ RNP complex assembled at room temperature (FIG. 2A) or at 37° C. (FIG. 2B). FIG. 2C illustrates alignment of CasΦ.2, CasΦ.7, CasΦ.10, and CasΦ.18 repeat sequences showing conserved (highlighted in black) and diverged nucleotides.

[0434] For this study, each of three CasΦ polypeptides (CasΦ.11, CasΦ.17 and CasΦ.18 in FIGS. 2A and 2B) was tested for their ability to nick input plasmid DNA when complexed with one of four crRNAs comprising the repeat sequences of CasΦ.2, CasΦ.7, CasΦ.10 and CasΦ.18 (abbreviated j2, j7, j10 and j18, respectively in FIG. 2A and FIG. 2B). Amino acid sequences of the proteins used in the experiment are shown in TABLE 4. Guide RNA sequences corresponding to j2, j7, j10 and j18 are provided in TABLE 5. The input plasmid was a super-coiled plasmid (sequence shown in EXAMPLE 3) comprising the target sequence TATTAAATACTCGTATTGCTGTTCGATTAT (SEQ ID NO: 10⁸) immediately downstream of a TTTN PAM. The incubation reaction to form the RNP complex was performed either at room temperature or at 37° C. for 60 minutes in NEB CutSmart buffer (50 mM Potassium Acetate, 20 mM Tris-Acetate, 10 mM Magnesium Acetate, 100 ug/ml BSA, pH 7.9 at 25° C.). The RNP complex was incubated with the input plasmid for 60 minutes at 37° C. The reaction was quenched with 1 mg/ml proteinase K, 0.08% SDS, and 15 mM EDTA. The data illustrated in FIG. 2A and FIG. 2B comes from a single replicate of the in vitro cis-cleavage experiment.

[0435] As shown in FIG. 2A, when the CasΦ polypeptides were assembled into RNP complexes with the guide nucleic acids at room temperature, crRNAs comprising repeat sequences from any of the proteins supported nickase activity by CasΦ.11, CasΦ.17 and CasΦ.18, with the exception of the CasΦ.17/CasΦ.2-repeat pairing. As shown in FIG. 2B, when the CasΦ polypeptides were assembled into RNP complexes with the guide nucleic acids at 37° C., as opposed to at room temperature, the activity of each protein was completely abolished when complexed with crRNAs comprising a repeat sequence from CasΦ.2 or CasΦ.10.

[0436] This example showed that the nickase activity of CasΦ can be affected by the crRNA repeat sequence. The data also showed that the nickase activity of CasΦ can be affected by the RNP complexing temperature.

[0437] FIG. 2D provides further examples of the nickase activity of CasΦ affected by the RNP complexing temperature. Nickase activity was assessed as described above for CasΦ.2, CasΦ.4, CasΦ.6, CasΦ.9, CasΦ.10, CasΦ.12 and CasΦ.13. Amino acid sequences of the proteins used in the experiment are shown in TABLE 1.

[0438] The effect of complexing temperature on the double strand cutting activity of CasΦ polypeptides was also assessed as described above. As shown in FIG. 2D, generally the double strand cutting activity of CasΦ polypeptides, particularly CasΦ.2, CasΦ.4 and CasΦ.12, is not affected by the RNP complexing temperature. Although some systems with less efficient double strand cutting activity, such as CasΦ.10, CasΦ.11 and CasΦ.13 in this example, are sensitive to RNP complexing temperature.

### Example 5

### CasΦ Nickase Cleaves Non-Target Strand

[0439] The present example shows that CasΦ nickase cleaves the non-target DNA strand. Results of the study are shown in FIG. 3. For this study, four different CasΦ polypeptides (CasΦ.12, CasΦ.2, CasΦ.11, and CasΦ.18 as shown in FIG. 1) were analyzed using a cis-cleavage assay. Amino acid sequences of the proteins used in the experiment are shown in TABLE 4. The CasΦ polypeptides were complexed with guide RNA to form RNP complexes All reactions were carried out using guide RNA comprising a crRNA sequence comprising the CasΦ.18 repeat sequence (ACCAAAACGACTATTGATTGCCCAGTACGCTGGGAC (SEQ ID NO: 57)). Complexing of the CasΦ polypeptides with guide RNA to form the ribonucleoprotein (RNP) complex was carried out at room temperature for 20 minutes. The RNP complex was incubated with the target DNA at 37° C. for 60 minutes in NEB CutSmart buffer (50 mM Potassium Acetate, 20 mM Tris-Acetate, 10 mM Magnesium Acetate, 100 ug/ml BSA, pH 7.9 at 25° C. The target nucleic acid used for the reactions was a super-coiled plasmid DNA (sequence shown in EXAMPLE 3) comprising the target sequence TATTAAATACTCGTATTGCTGTTCGATTAT (SEQ ID NO: 116), which was immediately downstream of a TTTN PAM sequence. The reaction was quenched with 1 mg/ml proteinase K, 0.08% SDS, and 15 mM EDTA. The resulting cleaved DNA from the reaction was Sanger sequenced using forward and reverse primers. The forward primer provided the sequence of the target strand (TS), while the reverse primer provided the sequence of the non-target strand (NTS). If a strand had been cleaved by the CasΦ polypeptide, the sequencing signal would drop off from the cleavage site in the sequencing data. FIG. 3 illustrates results of the Sanger sequencing.

[0440] FIG. 3, panel A, shows a control reaction where no CasΦ polypeptide was added. As a result, the target DNA was uncut and resulted in complete sequencing of both target and non-target strands. FIG. 3, panel B, illustrates the cleavage pattern for CasΦ.12, which comprises double-stranded DNA cleavage activity. The sequencing signal dropped off on both the target and the non-target strands (as shown by arrows), demonstrating cleavage of both strands of the target DNA. FIG. 3, panel C, illustrates the cleavage pattern for CasΦ.2, which predominantly nicks DNA (as illustrated in FIG. 1). The data showed that the sequencing signal dropped off on only the non-target strand (bottom arrow) demonstrating cleavage of the non-target strand. FIG. 3, panel D, illustrates the cleavage pattern for CasΦ.11, which comprises strong nickase activity (as illustrated in FIG. 1). The data showed that the sequencing signal dropped off on only the non-target strand (bottom arrow) demonstrating cleavage of the non-target strand. FIG. 3, panel E, illustrates the cleavage pattern for CasΦ.18, which comprises strong nickase activity (as illustrated in FIG. 1). The data showed that the sequencing signal dropped off on only the non-target strand (bottom arrow) demonstrating cleavage of the non-target strand. Thus, this example shows that CasΦ polypeptides comprising nickase activity cleave the non-target strand of a target DNA.

### Example 6

### Editing a Target Nucleic Acid

[0441] This example describes genetic modification of a target nucleic acid with a programmable CasΦ nuclease (e.g., any one of SEQ ID NO: 1-SEQ ID NO: 47, SEQ ID NO: 105 or SEQ ID NO: 107) of the present disclosure. The programmable CasΦ nuclease is administered with a guide nucleic acid capable of hybridizing to a segment of a target nucleic acid sequence of interests in a ribonucleoprotein complex or as separate nucleic acids encoding for each component. Subjects administered said composition are humans or non-human mammals. Upon binding of the guide nucleic acid to the segment of the target nucleic acid, the programmable CasΦ nuclease nicks or induces a double stranded break in the target. The target undergoes NHEJ or HDR. A donor nucleic acid may be co-administered. The donor nucleic acid may be to replace or repair a mutated segment of the target nucleic acid. The subject may have a disease. Upon genetic modification of the target nucleic acid, the disease or a symptom of the disease may be alleviated, or the disease may be cured.

### Example 7

### Editing a Plant or Crop Target Nucleic Acid

[0442] This example describes genetic modification of a plant or crop target nucleic acid with a programmable CasΦ nuclease (e.g., any one of SEQ ID NO: 1-SEQ ID NO: 47, SEQ ID NO: 105 or SEQ ID NO: 107) of the present disclosure. The programmable CasΦ nuclease is administered with a guide nucleic acid capable of hybridizing to a segment of a target nucleic acid sequence of interests in a ribonucleoprotein complex or as separate nucleic acids encoding for each component. Subjects administered said composition are plant or crop cells. Upon binding of the guide nucleic acid to the segment of the target nucleic acid, the programmable CasΦ nuclease nicks or induces a double stranded break in the target. The target undergoes NHEJ or HDR. A donor nucleic acid may be co-administered. The donor nucleic acid may be to replace or repair a mutated segment of the target nucleic acid. The result is an engineered plant or crop cell.

### Example 8

### Genetic Modification of a Target Nucleic Acid

[0443] This example describes genetic modification of a target nucleic acid with a dead programmable CasΦ nuclease (e.g., any one of SEQ ID NO: 1-SEQ ID NO: 47, SEQ ID NO: 105 or SEQ ID NO: 107 with a mutation rendering it catalytically inactive) of the present disclosure. The programmable CasΦ nuclease is further linked to a transcriptional regulator. The programmable CasΦ nuclease, the transcriptional regulator, and the guide nucleic acid capable of hybridizing to a segment of a target nucleic acid sequence of interests are administered as a ribonucleoprotein complex or as separate nucleic acids encoding for each component. Subjects administered said composition are humans or non-human mammals. Upon binding of the guide nucleic acid to the segment of the target nucleic acid, the dead programmable CasΦ nuclease upregulates or downregulates transcription. The subject may have a disease. Upon genetic modification of the target nucleic acid, the disease or a symptom of the disease may be alleviated, or the disease may be cured.

### Example 9

### Genetic Modification of a Plant of Crop Target Nucleic Acid

[0444] This example describes genetic modification of a plant or crop target nucleic acid with a dead programmable CasΦ nuclease (e.g., any one of SEQ ID NO: 1-SEQ ID NO: 47, SEQ ID NO: 105 or SEQ ID NO: 107 with a mutation rendering it catalytically inactive) of the present disclosure. The programmable CasΦ nuclease is further linked to a transcriptional regulator. The programmable CasΦ nuclease, the transcriptional regulator, and the guide nucleic acid capable of hybridizing to a segment of a target nucleic acid sequence of interests are administered as a ribonucleoprotein complex or as separate nucleic acids encoding for each component. Subjects administered said composition are humans or non-human mammals. Upon binding of the guide nucleic acid to the segment of the target nucleic acid, the dead programmable CasΦ nuclease upregulates or downregulates transcription. The result is an engineered plant or crop cell.

### Example 10

### Detection of a Target Nucleic Acid

[0445] This example describes detection of a target nucleic acid with a programmable CasΦ nuclease (e.g., any one of SEQ ID NO: 1-SEQ ID NO: 47, SEQ ID NO: 105 or SEQ ID NO: 107) of the present disclosure. The programmable CasΦ nuclease, the guide nucleic acid capable of hybridizing to a segment of a target nucleic acid sequence of interests, and a labeled ssDNA reporter are contacted to a sample. In the presence of the target nucleic acid in the sample, the guide nucleic acid binds to its target, thereby activating the programmable CasΦ nuclease to cleave the labeled ssDNA reporter and releasing a detectable label. The detectable label emits a detectable signal that is, optionally, quantified. In the absence of the target nucleic acid in the sample, the guide nucleic acid does not bind to its target, the labeled ssDNA reporter is not cleaved, and low or no signal is detected.

### Example 11

### Preference for Nicking or Double Strand Cleavage of Target DNA is a Property of CasΦ Enzymes, Independent of crRNA Repeat or Target Sequences

[0446] This example describes how the preference of a CasΦ polypeptide to cleave a single or both strands of a double-strand target DNA is independent of the crRNA repeat or target sequence. For this study, each of twelve CasΦ polypeptide (CasΦ.1, CasΦ.2, CasΦ.3, CasΦ.4, CasΦ.6, CasΦ.9, CasΦ.10, CasΦ.11, CasΦ.12, CasΦ.13, CasΦ.17 and CasΦ.18) was complexed with one of the crRNAs comprising the repeat sequences of CasΦ.1, CasΦ.2, CasΦ.4, CasΦ.7, CasΦ.10, CasΦ.11, CasΦ.12, CasΦ.13, CasΦ.17 and CasΦ.18. Amino acid sequences of the proteins used in the experiment are shown in TABLE 1 and crRNA sequences are provided in TABLE 2. The input plasmid was one of two super-coiled plasmids containing a target sequence (TATTAAATACTCGTATTGCTGTTCGATTAT (SEQ ID NO: 10⁸) or CACAGCTTGTCTGTAAGCGGATGCCATATG (SEQ ID NO: 109)) immediately downstream of a TTTN PAM. The incubation reaction to form the RNP complex was performed at room temperature for 20 minutes in NEB CutSmart buffer (50 mM Potassium Acetate, 20 mM Tris-Acetate, 10 mM Magnesium Acetate, 100 ug/ml BSA, pH 7.9 at 25° C.). The RNP complex was incubated with the input plasmid for 60 minutes at 37° C. The reaction was quenched with 1 mg/ml proteinase K, 0.08% SDS, and 15 mM EDTA.

[0447] As shown in FIG. 4A, CasΦ polypeptides have a preference for nicking or linearizing (i.e. cleaving both strands) a double strand plasmid DNA target and this preference is not affected by the crRNA repeat or target DNA sequence.

[0448] Raw data used to generate a subset of the heatmap in FIG. 4A is shown in FIG. 4B. These data show that CasΦ.12 is predominantly a linearizer of plasmid DNA, i.e. CasΦ.12 predominantly cleaves both strands of a double strand target DNA. Whereas CasΦ.18 is predominantly a nickase and predominantly cleaves one strand of a double strand target DNA.

[0449] This example showed that the preference of a CasΦ polypeptide to cleave a single or both strands of a double-strand target DNA is independent of the crRNA repeat or target sequence.

### Example 12

### Structural Conservation Across the CasΦ Repeats

[0450] This example describes the conservation of structure across the CasΦ repeats. In particular, FIG. 5A shows the structure of the crRNA repeats for CasΦ.1, CasΦ.2, CasΦ.7, CasΦ.11, CasΦ.12, CasΦ.13, CasΦ.18, and CasΦ.32. crRNA sequences are provided in TABLE 2. There is high sequence and structure conservation in the 3′ half of the CasΦ repeats. The LocARNA alignment tool was used to confirm the consensus structure of CasΦ repeats, which is shown in FIG. 5B. The consensus was determined on the basis of the following crRNA repeats: CasΦ.1, CasΦ.2, CasΦ.4, CasΦ.7, CasΦ.10, CasΦ.11, CasΦ.12, CasΦ.13, CasΦ.17, CasΦ.18, CasΦ.19, CasΦ.21, CasΦ.22, CasΦ.23, CasΦ.24, CasΦ.25, CasΦ.26, CasΦ.27, CasΦ.28, CasΦ.29, CasΦ.30, CasΦ.31, CasΦ.32, CasΦ.33, CasΦ.35, CasΦ.41. The sequence of these repeats is provided in TABLE 5. As shown in FIG. 5B, CasΦ repeats have a highly conserved 3′ hairpin which includes a double stranded stem portion and a single-stranded loop portion. One strand of the stem includes the sequence CYC and the other strand includes the sequence GRG, where Y and R are complementary. The loop portion typically comprises four nucleotides. The 3′ end of CasΦ repeats comprise the sequence GAC and the G of this sequence is in the stem of the hairpin.

[0451] This example shows the conserved structure of CasΦ crRNA repeats.

### Example 13

### CasΦ PAM Preferences on Linear Targets

[0452] The present example shows the PAM preferences for CasΦ polypeptides on linear double stranded DNA targets. For this study, five different CasΦ polypeptides (CasΦ.2, CasΦ.4, CasΦ.11, CasΦ.12 and CasΦ.18) were analyzed using a cis-cleavage assay. Amino acid sequences of the proteins used are shown in TABLE 1. The CasΦ polypeptides were complexed their native crRNAs (i.e. the corresponding CasΦ.2, CasΦ.4, CasΦ.11, CasΦ.12 and CasΦ.18 repeats) to form RNP complexes at room temperature for 20 minutes. The RNP complex was incubated with target DNA at 37° C. for 60 minutes in NEB CutSmart buffer (50 mM Potassium Acetate, 20 mM Tris-Acetate, 10 mM Magnesium Acetate, 100 ug/ml BSA, pH 7.9 at 25° C.). The target DNA was a 1.1 kb PCR-amplified DNA product. Stating with a TTTA PAM, each position was varied one by one to the other 3 nucleotides for a total of 12 variants in addition to the parental TTTA PAM. Linear fragments were used to disfavor cleavage for greater sensitivity of PAM preference determination. FIG. 6A illustrates the absolute levels of double strand cleavage (or nicking for CasΦ.18). FIG. 6B illustrates the data from FIG. 6A after normalization to the parental TTTA PAM as 100%. FIG. 6C provides a summary of the optimal PAM preferences from the data in FIG. 6A and FIG. 6B. CasΦ.2 recognizes a GTTK PAM, where K is G or T. CasΦ.4 recognizes a VTTK PAM, where V is A, C or G and K is G or T. CasΦ.11 recognizes a VTTS PAM, where V is A, C or G and S is C or G. CasΦ.12 recognizes a TTTS PAM, where S is C or G. CasΦ.18 recognizes a VTTN PAM, where V is A, C or G and N is A, C, G or T.

[0453] This example shows the optimized PAM preferences for some of the CasΦ polypeptides.

### Example 14

### CasΦ Polypeptides Rapidly Nick Supercoiled DNA

[0454] The present example shows that CasΦ polypeptides rapidly nick supercoiled DNA but vary in their ability to deliver the second strand cleavage. For this study, five different CasΦ polypeptides (CasΦ.2, CasΦ.4, CasΦ.11, CasΦ.12 and CasΦ.18) were analyzed using a cis-cleavage assay. Amino acid sequences of the proteins used are shown in TABLE 1. The CasΦ polypeptides were complexed with their native crRNA to form 200 nM RNP complexes at room temperature in NEB CutSmart buffer (50 mM Potassium Acetate, 20 mM Tris-Acetate, 10 mM Magnesium Acetate, 100 ug/ml BSA, pH 7.9 at 25° C.) for 20 minutes in a volume of 30 μl. The target plasmid was one of two 2.2 kb super-coiled plasmids containing a target sequence (TATTAAATACTCGTATTGCTGTTCGATTAT (SEQ ID NO: 10⁸) or CACAGCTTGTCTGTAAGCGGATGCCATATG (SEQ ID NO: 109), the guide RNAs targeted the underlined sequence) immediately downstream of a GTTG or TTTG PAM. At time “0” 30 μl of 20 nM target plasmid was mixed with RNP for a total volume of 60 μl. The incubation temperature was 37° C. At 1, 3, 6, 15, 30 and 60 minutes, 9 μl portions of the reaction were withdrawn and stopped with reaction quench (1 mg/ml proteinase K, 0.08% SDS and 15 mM EDTA) and allowed to deproteinize for 30 minutes at 37° C. before agarose gel analysis. The cleavage was quantified as nicked or linear. FIG. 7 shows the rapid nicking of supercoiled target DNA by CasΦ polypeptides. The decrease in nicked products over time is due to the formation of linear product as the CasΦ polypeptides cleaves the second strand of the target DNA. CasΦ.12 rapidly cleaves both strands of supercoiled DNA.

[0455] This example shows that CasΦ polypeptides rapidly nick supercoiled DNA.

### Example 15

### CasΦ Polypeptides Prefers Full Length Repeats and Spacers Form 16-20 Nucleotide

[0456] The present example shows that CasΦ polypeptides prefer full-length repeats and spacers from 16 to 20 nucleotides. For this study, each of five CasΦ polypeptides (CasΦ.2, CasΦ.4, CasΦ.11, CasΦ.12 and CasΦ.18 in FIGS. 8A and 8B) was tested for their ability to cleave input plasmid DNA when complexed with one of either of the crRNAs comprising the repeat sequences of CasΦ.2 or CasΦ.18 (abbreviated j2 and j18, respectively in FIG. 8A and FIG. 8B). Amino acid sequences of the proteins used in the experiment are shown in TABLE 1. Guide RNA sequences corresponding to j2 and j18 are provided in TABLE 2. The CasΦ polypeptides were complexed to the crRNA in NEB CutSmart Buffer (50 mM Potassium Acetate, 20 mM Tris-Acetate, 10 mM Magnesium Acetate, 100 ug/ml BSA, pH 7.9 at 25° C.) for 20 minutes at room temperature. The ability of the CasΦ polypeptides to cleave a 2.2 kb plasmid containing a target sequence was assessed (FUT8_1: ACGCGTTTTAGAAGAGCAGCTTGTTAAGGCCAAAGAACAGATTGA (SEQ ID NO: 1413) and DNMT_1: AAAGATTTGTCCTTGGAGAACGGTGCTCATGCTTACAACCGGGA (SEQ ID NO: 1414), the PAM is underlined). Spacers targeting these target sequences were shortened from the 3′ end. The cleavage incubation was at 37° C. and the reaction was quenched after 10 minutes with 1 mg/ml proteinase K, 0.08% SDS and 15 mM EDTA. To assess the effect of shortening the crRNA repeats, the repeats were shortened from the 5′ end.

[0457] As shown in FIG. 8A, cRNA repeats with a length of 19 to 37 nucleotides supported cleavage activity of CasΦ polypeptides.

[0458] As shown in FIG. 8B, cleavage activity was observed over the range of spacer lengths tested (16 to 35 nucleotides). The optimal spacer length to support the cleavage activity of CasΦ polypeptides in this in vitro system is 16 to 20 nucleotides.

[0459] This example shows that CasΦ polypeptides prefer crRNA repeat lengths of 19 to 37 nucleotides and spacer lengths of 16 to 20 nucleotides in vitro.

### Example 16

### CasΦ.12 Spacer Length Optimization in HEK293T Cells

[0460] The present example shows the use of CasΦ.12 as a gene editing tool in HEK293T cells and the effect of changing the length of the spacer. As illustrated in the schematic in FIG. 9A, a stable HEK293T cell line that expresses AcGFP was established. A plasmid expressing the crRNA under the control of the U6 promoter and CasΦ.12 under the control of the EF1a promoter was transfected into the AcGFP-expressing HEK293T cell line. The CasΦ.12 was expressed as FLAGtag-SV40NLS-Cas12j.12-NLS-T2A-PuroR. GFP expression was assessed by flow cytometry at days 5, 7 and 10. The 30 nucleotide spacer sequence is 5′-TTGCCCAGGATGTTGCCATCCTCCTTGAAA-3′ (SEQ ID NO: 1415). To assess the effect of different spacer length, the spacer was shortened from its 3′ end. As shown in FIG. 9B, a spacer length of 15 to 30 nucleotides supported CasΦ.12 cleavage activity in HEK293T cells, but with less cleavage detected with the 15 and 16 nucleotide spacers. There is a preference for CasΦ.12 to have a spacer length of 17 to 22 nucleotides, but cleavage activity is still supported with the longer spacers tested.

### Example 17

### CasΦ Nucleases are a Novel Class of Protein

[0461] This example illustrates that the CasΦ nucleases identified herein are a novel class of Cas proteins. SEQ ID NOs: 1 to 47 and SEQ ID NO. 105 were searched in the InterPro database, but were not identified as belonging to a class of protein. As an example, the results for SEQ ID NO: 2 are shown in FIG. 10A. As a positive control, the Cpf1 sequence from Acidaminococcus sp. (strain BV3L6) was also searched and was identified as a CRISPR-associated endonuclease Cas12a family member, as shown in FIG. 10B.

### Example 18

### DNA Cleavage by CasΦ.19-CasΦ.48

[0462] This example illustrates the DNA cleavage activity of CasΦ.19 to CasΦ.45. Amino acid sequences of the proteins used in the experiment are shown in TABLE 1. The CasΦ polypeptides were complexed with their native crRNA (or the crRNA of the CasΦ polypeptide with the closest match based on amino acid sequence identity) to form 100 nM RNP complexes at room temperature in NEB CutSmart buffer (50 mM Potassium Acetate, 20 mM Tris-Acetate, 10 mM Magnesium Acetate, 100 ug/ml BSA, pH 7.9 at 25° C.) for 20 minutes in a volume of 30 μl. crRNA sequences are provided in TABLE 2. The target plasmid was a 2.1 kb plasmid containing the target sequence TATTAAATACTCGTATTGCTGTTCGATTAT (SEQ ID NO: 10⁸). The cleavage incubation was performed at 37° C. and the reaction was quenched after 60 minutes. Cleavage products where then analyzed by gel electrophoresis, as shown in FIG. 13A. This analysis identifies CasΦ.20, CasΦ.22, CasΦ.24, CasΦ.25, CasΦ.28, CasΦ.31, CasΦ.32, CasΦ.37, CasΦ.43 and CasΦ.45 as enzymes that predominantly linearize plasmid DNA, i.e. they predominantly cleave both strands of a double strand target DNA. Whereas DNA cleavage by CasΦ.21 results in mixed nicked and linear product, indicating that CasΦ.21 functions as a nickase as well as a linearizer of plasmid DNA with a preference for nickase activity under the conditions of the present study. Mixed nicked and linearized cleavage products were also identified following cleavage by CasΦ.26, CasΦ.29, CasΦ.33, CasΦ.34, CasΦ.38 and CasΦ.44. ‘SC’ represents ‘super-coiled’ un-cut target plasmid.

[0463] This example shows robust DNA cleavage by CasΦ polypeptides.

[0464] The inventors went on to demonstrate the robust generation of indels following targeting by CasΦ.12, CasΦ.20, CasΦ.21, CasΦ.22, CasΦ.25, CasΦ.28, CasΦ.31, CasΦ.32, CasΦ.33, CasΦ.34, CasΦ.37, CasΦ.43, and CasΦ.45. A stable HEK293T cell line that expresses AcGFP was established. HEK293T-AcGFP cells were transfected with crRNA and CasΦ expression plasmids using lipofectamine on day 0. Target sequences are provided in TABLE 6. Cells were harvested by trypsinization on day 3 for TIDE analysis. The target locus was amplified by PCR and the amplified product was then sequenced using Sanger sequencing. The TIDE analysis provides the frequency of indel mutations (https://tide.nki.n1/#about). As shown in FIG. 13B, targeting CasΦ.12, CasΦ.20, CasΦ.21, CasΦ.22, CasΦ.25, CasΦ.28, CasΦ.31, CasΦ.32, CasΦ.33, CasΦ.34, CasΦ.37, CasΦ.43, and CasΦ.45 to AcGFP led to the robust generation of indel mutations. FIG. 13C provides an alternative representation of the data shown in FIG. 13B for CasΦ.12, CasΦ.28, CasΦ.31, CasΦ.32 and CasΦ.33. These data further demonstrate the genome editing ability of CasΦ.20, CasΦ.21, CasΦ.22, CasΦ.25, CasΦ.28, CasΦ.31, CasΦ.32, CasΦ.33, CasΦ.34, CasΦ.37, CasΦ.43, and CasΦ.45.

TABLE 6

| | | PAM | | SEQ ID |
|---|---|---|---|---|
| | Target Sequence | eGFP | PAM acGFP | NO |
| KT_eGFP | TTAAGGCCAAAGAACAGATT | CTTG | CTTG | 1416 |
| OT_eGFP | CGTGATGGTCTCGATTGAGT | None | None | 1417 |
| T1_eGFP | AAGAAGTCGTGCTGCTTCAT | CTTG | CTTG | 1418 |
| T2_eGFP | ATCTGCACCACCGGCAAGCT | GTTC | GTTC | 1419 |
| T3_eGFP | TGGCGGATCTTGAAGTTCAC | GTTG | GTTG | 1420 |
| T4_eGFP | CCGTAGGTGGCATCGCCCTC | GTTC | CTTC | 1421 |
| T5_eGFP | ACGTCGCCGTCCAGCTCGAC | GTTT | None | 1422 |
| T6_eGFP | AAGAAGATGGTGCGCTCCTG | CTTG | CTCG | 1423 |

### Example 19

### PAM Requirement for CasΦ Determined by In Vitro Enrichment

[0465] This example illustrates the NTTN PAM requirement for CasΦ.2, CasΦ.4, CasΦ.11 and CasΦ.12. An in vitro enrichment (IVE) analysis was performed. The CasΦ polypeptides were complexed with crRNA to form 500 nM RNP complexes at room temperature in NEB CutSmart buffer (50 mM Potassium Acetate, 20 mM Tris-Acetate, 10 mM Magnesium Acetate, 100 ug/ml BSA, pH 7.9 at 25° C.) for 30 minutes in a volume of 25 μl. crRNA sequences are provided in TABLE 2. The cleavage incubation was performed at 37° C. and the reaction was quenched after 30 minutes. The substrate for the cleavage incubation was a pooled plasmid library which includes different PAM sequences. After quenching, the cleavage reactions were cleaned using Beckman SPRi beads. The samples were sequenced to identify which PAM sequences enabled target cleavage by the CasΦ polypeptides. As shown in FIG. 14A, this analysis revealed an NTTN PAM requirement for CasΦ.2, CasΦ.4, CasΦ.11 and CasΦ.12.

[0466] The inventors went on to assess the PAM requirement of CasΦ.20, CasΦ.26, CasΦ.32, CasΦ.38 and CasΦ.45. An IVE analysis was performed using the protocol described above for CasΦ.2, CasΦ.4, CasΦ.11 and CasΦ.12. As shown in FIG. 14B, Sanger sequencing revealed a NTNN PAM requirement for CasΦ.20, a NTTG PAM requirement for CasΦ.26, a GTTN PAM requirement for CasΦ.32 and CasΦ.38, and a NTTN PAM requirement for CasΦ.45.

[0467] The inventors also determined a single-base PAM requirement for CasΦ.20, CasΦ.24 and CasΦ.25. Amino acid sequences of the proteins used are shown in TABLE 1. The CasΦ polypeptides were complexed with their native crRNAs to form RNP complexes at room temperature for 20 minutes. crRNA sequences are provided in TABLE 2. The RNP complexes were incubated with target DNA at 37° C. for 60 minutes in NEB CutSmart buffer (50 mM Potassium Acetate, 20 mM Tris-Acetate, 10 mM Magnesium Acetate, 100 ug/ml BSA, pH 7.9 at 25° C.). The RNPs were then used in cleavage reactions with plasmid DNA comprising a target sequence and a PAM. Stating with a TTTg PAM, the PAM was mutated to each of the sequences shown in FIG. 14C to assess the PAM requirement. The products of the cleavage reactions were analyzed by gel electrophoresis, as seen in FIG. 14C. FIG. 14D provides the quantification of the gels shown in FIG. 14C. Together, the data in FIG. 14C and FIG. 14D demonstrate a NTNN PAM for DNA cleavage by CasΦ.20, CasΦ.24 and CasΦ.25.

[0468] This example demonstrates PAM sequences that enable CasΦ polypeptides to be targeted to a target sequence.

### Example 20

### CasΦ-Mediated Genome Editing in HEK293T Cells

[0469] This example illustrates the ability of CasΦ polypeptides to mediate genome editing in HEK293T cells, a cell line which is widely used in biological research. In this study, a CasΦ.12 plasmid, including both CasΦ polypeptide sequence and gRNA sequence, sometimes called an all-in-one, was delivered via lipofection. Spacers targeted exon 4 of the Fut8 gene. The spacer sequences are provided in TABLE 7. Cells were transfected on day 0 and harvested for analysis on day 5. As shown in FIG. 15, the target locus was modified following delivery of CasΦ.12 and gRNA 2. Cas9 was delivered to HEK293T cells to provide a positive control and no modification was detected when a non-targeting (NT) gRNA was used. The presence of indels was confirmed by next generation sequence analysis. The sample targeted by CasΦ.12 and gRNA 2 is shown in FIG. 15. The next generation sequence analysis revealed a diverse pattern of indels. The most frequent mutations were deletion mutations of 4 to 18 base pairs. The frequency of mutations was quantified and is illustrated as “% modified”, which is defined as the % of modification in the DNA sequence when aligned to unedited cells. Modifications can be deletions, insertions and substitutions.

[0470] This example demonstrates the use of CasΦ.12 as a robust genome editing tool.

TABLE 7

| | | Spacer sequence (5′ → 3′) |
|---|---|---|
| Name | Target | [SEQ ID NO] |
| Fut8_1 | CasPhi target | GAAGAGCAGCTTGTTAAGGC |
| | | (SEQ ID NO: 1424) |
| Fut8_2 | CasPhi target | GCCTTAACAAGCTGCTCTTC |
| | | (SEQ ID NO: 1425) |
| Fut8_3 | Cas9 target | ATTGATCAGGGGCCAgctat |
| | (control) | (SEQ ID NO: 1426) |
| Fut8_4 | Cas9 target | Acgcgtactcttcctatagc |
| | (control) | (SEQ ID NO: 1427) |
| NT | Non target | CGTGATGGTCTCGATTGAGT |
| | | (SEQ ID NO: 1428) |

### Example 21

### CasΦ-Mediated Genome Editing in CHO Cells

[0471] This example illustrates the ability of CasΦ polypeptides to mediate genome editing in CHO cells, an epithelial cell line which is frequently used in biological and medical research. To test the function of CasΦ.12 in CHO cells, 40 pmol CasΦ.12 was complexed to its native crRNA (2.5:1 crRNA:CasΦ). To prepare a mastermix of CasΦ.12 RNP, 3 μl crRNA (at 100 nM) was added to 1.6 μl CasΦ.12 (at 75 μM). Spacer sequences are provided in Table 8. The RNP complexes were incubated at 37° C. for 30 minutes. CHO cells were resuspended at 1.2×10⁶ cells/ml in SF solution (Lonza). 40 μl of the cell suspension was added to the RNP complexes and 20 μl of the resultant suspension was then transferred to individual tubes for nucleofection. Lonza setting FF-137 was used to nucleofect the CHO cells. Cells were then harvested for analysis on day 5. As shown in FIG. 16A, CasΦ.12 induced the generation of indels in each of the endogenous genes tested (Bak1, Bax and Fut8). The ability of CasΦ.12 to induce indel mutations in each of these genes is further shown in FIG. 16F for Bak1, FIG. 16G for Bax and FIG. 16H for Fut8. Spacer sequences for FIG. 16F, FIG. 16G and FIG. 16H are provided in Tables F, G, and H, respectively. The data shown in FIG. 16F-H were produced with 200,000 CHO cells per transfection, RNP complexed with 250 pmol of CasΦ.12, and full-length unmodified guide RNA in molar excess relative to CasΦ.12, using the same Lonza reagents described for producing data presented in FIGS. 16A-E.

TABLE 8

| | | Repeat + Spacer sequence (5′ → 3′), |
|---|---|---|
| Name | Spacer sequence (5′ → 3′) | shown as DNA |
| Bak1_1 | GAAGCTATGTTTTCCAT | CTTTCAAGACTAATAGATTGCTCCTTACGA |
| | CTC (SEQ ID NO: 443) | GGAGACGAAGCTATGTTTTCCATCTC (SEQ |
| | | ID NO: 1197) |
| Bak1_2 | GCAGGGGCAGCCGCCC | CTTTCAAGACTAATAGATTGCTCCTTACGA |
| | CCTG | GGAGACGCAGGGGCAGCCGCCCCCTG |
| | (SEQ ID NO: 444) | (SEQ ID NO: 1198) |
| Bak1_3 | CTCCTAGAACCCAACA | CTTTCAAGACTAATAGATTGCTCCTTACGA |
| | GGTA | GGAGACCTCCTAGAACCCAACAGGTA |
| | (SEQ ID NO: 445) | (SEQ ID NO: 1199) |
| Bak1_4 | GAAAGACCTCCTCTGTG | CTTTCAAGACTAATAGATTGCTCCTTACGA |
| | TCC (SEQ ID NO: 446) | GGAGACGAAAGACCTCCTCTGTGTCC (SEQ |
| | | ID NO: 1200) |
| Bak1_5 | TCCATCTCGGGGTTGGC | CTTTCAAGACTAATAGATTGCTCCTTACGA |
| | AGG (SEQ ID NO: 447) | GGAGACTCCATCTCGGGGTTGGCAGG |
| | | (SEQ ID NO: 1201) |
| Bak1_6 | TTCCTGATGGTGGAGAT | CTTTCAAGACTAATAGATTGCTCCTTACGA |
| | GGA (SEQ ID NO: 448) | GGAGACTTCCTGATGGTGGAGATGGA |
| | | (SEQ ID NO: 1202) |
| Bax_1 | CTAATGTGGATACTAAC | CTTTCAAGACTAATAGATTGCTCCTTACGA |
| | TCC (SEQ ID NO: 479) | GGAGACCTAATGTGGATACTAACTCC (SEQ |
| | | ID NO: 1269) |
| Bax_2 | TTCCGTGTGGCAGCTGA | CTTTCAAGACTAATAGATTGCTCCTTACGA |
| | CAT (SEQ ID NO: 480) | GGAGACTTCCGTGTGGCAGCTGACAT (SEQ |
| | | ID NO: 1270) |
| Bax_3 | CTGATGGCAACTTCAAC | CTTTCAAGACTAATAGATTGCTCCTTACGA |
| | TGG (SEQ ID NO: 481) | GGAGACCTGATGGCAACTTCAACTGG |
| | | (SEQ ID NO: 1271) |
| Bax_4 | TACTTTGCTAGCAAACT | CTTTCAAGACTAATAGATTGCTCCTTACGA |
| | GGT (SEQ ID NO: 482) | GGAGACTACTTTGCTAGCAAACTGGT (SEQ |
| | | ID NO: 1272) |
| Bax_5 | AGCACCAGTTTGCTAGC | CTTTCAAGACTAATAGATTGCTCCTTACGA |
| | AAA (SEQ ID NO: 483) | GGAGACAGCACCAGTTTGCTAGCAAA |
| | | (SEQ ID NO: 1273) |
| Bax_6 | AACTGGGGCCGGGTTG | CTTTCAAGACTAATAGATTGCTCCTTACGA |
| | TTGC (SEQ ID NO: 484) | GGAGACAACTGGGGCCGGGTTGTTGC |
| | | (SEQ ID NO: 1274) |
| Fut8_1 | CCACTTTGTCAGTGCGT | CTTTCAAGACTAATAGATTGCTCCTTACGA |
| | CTG (SEQ ID NO: 507) | GGAGACCCACTTTGTCAGTGCGTCTG (SEQ |
| | | ID NO: 1325) |
| Fut8_2 | CTCAATGGGATGGAAG | CTTTCAAGACTAATAGATTGCTCCTTACGA |
| | GCTG (SEQ ID NO: 508) | GGAGACCTCAATGGGATGGAAGGCTG |
| | | (SEQ ID NO: 1326) |
| Fut8_3 | AGGAATACATGGTACA | CTTTCAAGACTAATAGATTGCTCCTTACGA |
| | CGTT (SEQ ID NO: 509) | GGAGACAGGAATACATGGTACACGTT |
| | | (SEQ ID NO: 1327) |
| Fut8_4 | AAGAACATTTTCAGCTT | CTTTCAAGACTAATAGATTGCTCCTTACGA |
| | CTC (SEQ ID NO: 510) | GGAGACAAGAACATTTTCAGCTTCTC (SEQ |
| | | ID NO: 1328) |
| Fut8_5 | ATCCACTTTCATTCTGC | CTTTCAAGACTAATAGATTGCTCCTTACGA |
| | GTT (SEQ ID NO: 511) | GGAGACATCCACTTTCATTCTGCGTT (SEQ |
| | | ID NO: 1329) |
| Fut8_6 | TTTGTTAAAGGAGGCA | CTTTCAAGACTAATAGATTGCTCCTTACGA |
| | AAGA (SEQ ID NO: 512) | GGAGACTTTGTTAAAGGAGGCAAAGA |
| | | (SEQ ID NO: 1330) |

[0472] The inventors went on to demonstrate the ability of CasΦ.12 to mediate gene editing via the homology directed repair pathway. The inventors tested DNA donor oligos with 25 bp, 50 bp or 90 bp homology arms (HA), as shown in FIG. 16B. The donor oligos were delivered to CHO cells with or without CasΦ.12 and crRNA. As seen in FIG. 16C, indels were not detected in the absence of CasΦ.12. Whereas, indels were detected in the presence of CasΦ.12 and confirmed by sequencing the endogenous targeted locus (FIG. 16D). The sequencing analysis also showed the successful incorporation of a DNA donor oligo into the endogenous targeted locus (FIG. 16E).

[0473] The inventors further demonstrated the ability of CasΦ.12 to mediate gene editing of Bax and Fut8 genes via the homology directed repair pathway. In this additional study, DNA donor oligos with 20 bp, 25 bp, 30 bp or 40 bp 90 bp HA were used, shown in FIG. 161. These DNA donor oligos were either unmodified or modified with phosphorothioate (PS) bonds between the first 5′, and the last two 3′ bases. As shown in FIG. 16J, CasΦ.12 mediated successful incorporation of a DNA donor oligo into the endogenous targeted locus. Finally, the inventors further optimized CasΦ.12-mediated genome editing of Fut8 using AAV6 delivery of the DNA donor. In this study, CHO cells were transfected with Fut8-targeting RNP (500 pmol) using Lonza nucleofection protocols. AAV6 donors at different MOIs were added to cells immediately after transfection. The frequency of indels and HDR was analyzed by NGS. As shown in FIG. 16K and FIG. 16L, CasΦ.12 induced the generation of indels and HDR.

[0474] These data further demonstrate the utility of CasΦ polypeptides as a genome editing tool.

### Example 22

### CasΦ-Mediated Genome Editing in K562 Cells

[0475] This example illustrates the ability of CasΦ polypeptides to mediate genome editing in K562 cells, a myelogenous leukemia cell line which is particularly useful for biological and medical research by virtue of its amenability for nucleofection by electroporation. In this study, K562 cells were nucleofected with Cas9 or CasΦ.12. To nucleofect the cells, 150,000 cells in SF solution (SF Cell Line 96 Amaxa) were added to the amount of plasmid (expressing the gRNA targeting the Fut8 gene and either Cas9 or CasΦ.12) indicated in FIG. 17. Amaxa program 96-FF-120 was used to nucleofect the cells. The cells were harvested two days after nucleofection and the frequency of indel mutations was determined. As shown in FIG. 17, as the amount of CasΦ.12 plasmid increased, the amount of indels detected in the endogenous Fut8 gene also increased.

### Example 23

### CasΦ-Mediated Genome Editing in Primary Cells

[0476] This example illustrates the ability of CasΦ polypeptides to mediate genome editing in primary cells, such as T cells. In this study, CasΦ.12 was delivered to human T cells. CasΦ.12 was complexed to its native crRNA comprising the spacer sequence 5′-GGGCCGAGAUGUCUCGCUCC-3′ (SEQ ID NO: 1429). Complexes were formed in a 3:1 ratio of crRNA:protein. For nucleofection, 50 pmol RNP was mixed with 320,000 cells per well and the Amaxa EH115 program was used. Immediately after nucleofection, 80 μl pre-warmed culture medium was added to each well. The cells were then left in the cuvette plate for 15 minutes before transfer to the culture plate. Genomic DNA was extracted from cells on day 3 and day 5. Flow cytometry analysis was performed on day 5. As shown in FIG. 18A, when CasΦ.12 was delivered with a gRNA targeting the endogenous beta-2 microglobulin (B2M) gene, a distinct population of B2M-negative cells was detected by flow cytometry analysis demonstrating the CasΦ.12-mediated knockout of the endogenous B2M gene. In the absence of the B2M-targeting gRNA, the population of B2M-negative cells was not observed by flow cytometry. Indels were confirmed by next generation sequencing analysis, as shown FIG. 18C, and quantified, as shown in FIG. 18B.

[0477] The inventors went on to use CasΦ.12 to target the T-cell receptor alpha-constant (TRAC) gene. Knockout of the TRAC gene prevents expression of the T cell receptor. Accordingly, TRAC knockout T cells are beneficial for T cell therapies (e.g. CAR-T cell therapies) because TRAC knockout T cells have a longer half-life in vivo as the T cells have less potential to attack the recipient's normal cells. In this study, CasΦ.12 and gRNA targeting the TRAC gene (CasPhi1 or CasPhi7) were delivered to T cells. As shown in FIG. 18D, the delivery of the CasΦ.12 and the gRNA resulted in a population of TRAC-negative cells, which were detected by flow cytometry. The inventors went on to confirm the presence of indel mutations by sequencing the target locus. As shown in FIG. 18E, the sequence analysis revealed insertion, deletion and substitution mutations at the endogenous targeted locus. The frequency of indel mutations was quantified, as shown in FIG. 18F.

[0478] These data demonstrate the utility of CasΦ polypeptides as a robust genome editing tool in primary human cells.

### Example 24

### Separable DNA Strand Cleavage Reactions of CasΦ Nucleases

[0479] This example further illustrates the mechanism of DNA strand cleavage by CasΦ polypeptides. In this study, CasΦ.4, CasΦ.12 and CasΦ.18 were complexed with their native crRNA. RNP complexes were formed by a 20 minute incubation at room temperature. The target plasmid was a 2.1 kb plasmid containing the target sequence TATTAAATACTCGTATTGCTGTTCGATTAT (SEQ ID NO: 10⁸). The cleavage reaction was carried out at 37° C. and had a duration of 30 minutes. The cleavage products were then analyzed by gel electrophoresis. As shown in FIG. 19, CasΦ polypeptides nick supercoiled (sc) DNA by cleaving the non-target DNA strand. Some CasΦ polypeptides, such as CasΦ.4 and CasΦ.12, then go on to cleave the second (target) strand to generate a linear product from a plasmid target. Whereas some CasΦ polypeptides, such as CasΦ.18, function as nickases and do not go on to cleave the second strand. CasΦ cleavage activity is dependent on metal cations, such as Mg²⁺. Varying the concentration of Mg²⁺ allows the cleavage of the first strand and then second strand by CasΦ.4 and CasΦ.12 to be visualized. As the concentration of Mg²⁺ increases, the amount of linearized product detected increases indicating that the second strand has been cleaved in the CasΦ.4 and CasΦ.12 reactions.

### Example 25

### Detection of a Target Nucleic Acid by CasΦ Polypeptides

[0480] This example illustrates the use of CasΦ.4 and CasΦ.18 in a nucleic acid detection assay by virtue of trans cleavage activity of ssDNA. In this study, 100 nM RNP was prepared and used in a detection assay. In the detection assay, the target dsDNA was at a concentration of 10 nM and the ssDNA reporter molecule was at a concentration of 100 nM. The target dsDNA included 5 target sequences, which were targeted by a pool of 5 gRNAs) with 7 base pairs flanking the 20 nucleotide target sequences on both 5′ and 3′ sides, as shown in FIG. 20. The detection assay was carried out at 37° C. The buffer conditions provided in TABLE 9 were tested in the detection assay. All buffers were supplemented with 0.1 mg/ml BSA and 1 mM TCEP. As seen in FIG. 20, when a gRNA (complexed to a CasΦ polypeptide) hybridizes to a target nucleic acid, the CasΦ 's trans cleavage activity is activated such that a labeled ssDNA reporter is degraded. The degradation of the ssDNA reporter is detected as fluorescence thus allowing CasΦ polypeptides to be used in assays to achieve fast and high-fidelity detection of target nucleic acid molecules in a sample. As shown in FIG. 20, high pH (e.g. 8-9) and high Mg²⁺ concentration (e.g. 12-15 mM) provided preferred conditions for the detection assay.

TABLE 9

| buffer ID # | pH | 1X NaCl (mM) | 1X MgCl₂ (mM) |
|---|---|---|---|
| 1 | 9 | 150 | 15 |
| 2 | 9 | 150 | 3 |
| 3 | 7.5 | 0 | 3 |
| 4 | 9 | 0 | 3 |
| 5 | 9 | 0 | 15 |
| 6 | 7.5 | 150 | 3 |
| 7 | 7.5 | 150 | 15 |
| 8 | 8 | 37.5 | 3 |
| 9 | 8.5 | 150 | 12 |
| 10 | 7.5 | 0 | 15 |
| 11 | 8.5 | 0 | 6 |
| 12 | 9 | 150 | 3 |
| 13 | 9 | 0 | 3 |
| 14 | 9 | 150 | 15 |
| 15 | 8 | 150 | 6 |
| 16 | 7.5 | 150 | 15 |
| 17 | 8 | 112.5 | 15 |
| 18 | 9 | 0 | 15 |
| 19 | 7.5 | 150 | 3 |
| 20 | 8.5 | 112.5 | 3 |
| 21 | 8.5 | 37.5 | 12 |
| 22 | 7.5 | 0 | 3 |
| 23 | 8.5 | 112.5 | 6 |
| 24 | 7.5 | 37.5 | 6 |
| 25 | 8 | 0 | 12 |
| 26 | 7.5 | 112.5 | 6 |
| 27 | 8.5 | 37.5 | 15 |
| 28 | 9 | 37.5 | 6 |
| 29 | 9 | 112.5 | 12 |
| 30 | 7.5 | 37.5 | 12 |
| 31 | 7.5 | 0 | 15 |
| 32 | 7.5 | 112.5 | 12 |

[0481] These data demonstrate the utility of CasΦ polypeptides in nucleic acid detection assays.

### Example 26

### High Efficiency of CasΦ Polypeptide-Mediated Genome Editing in Primary Cells

[0482] The present example shows that CasΦ.12 mediates high genome editing efficiency that is comparable the editing efficiency mediated by Cas9. Results of the study are shown in FIG. 21. In this study, CasΦ.12 mRNA (SEQ TD NO: 107) with a gRNA (CUUUCAAGACUAAUAGAUUGCUCCUUACGAGGAGACGGGCCGAGAUGUCUCGCUCC (SEQ ID NO: 1430)); spacer sequence is bold and underlined) or Cas9 mRNA with a gRNA (GGCCGAGATGTCTCGCTCCG (SEQ TD NO: 1431)) was delivered to T cells. gRNAs used in this study targeted the B32M gene. For nucleofection, T cells were resuspended in BTXpress electroporation medium (5×10⁵ cells per well) and mixed with CasΦ.12 or Cas9 mRNA and 500 pmol gRNA. Cells were collected on day 2 for extraction of genomic DNA, and the frequency of indel mutations was determined. As shown in FIG. 21A, when 20 μg of CasΦ.12 mRNA was delivered with gRNA to T cells, high genome editing efficiency was achieved, and this was at a similar level to of genome editing achieved using Cas9. Cells were also collected on Day 2 for flow cytometry to determine the frequency of B12M knockout. As shown in FIG. 21B and quantified in FIG. 21A, a similar percentage of B12M-negative cells were detected after delivery of CasΦ.12 or Cas9 mRNA. Accordingly, this example demonstrates high efficiency of CasΦ polypeptide-mediated genome efficiency in primary cells.

### Example 27

### CasΦ Polypeptide-Mediated Genome Editing in CHO Cells

[0483] This present example describes the identification of optimized gRNAs for CasΦ.12-mediated genome editing in CHO cells. In this study, CasΦ.12 polypeptides (SEQ ID NO: 107) were complexed with a gRNA shown in TABLE 10. CHO cells were resuspended in SF solution and Lonza setting FF-137 was used to nucleofect the cells (200,000 cells per well) with 250 pmol RNP. Genomic DNA was extracted and the presence of indels was confirmed by next generation sequence analysis. FIG. 22A shows the frequency of indel mutations induced by CasΦ.12 polypeptides complexed with a 2′fluoro modified gRNA. As shown in FIG. 22B, gRNAs with ˜20% or greater editing efficiency were identified.

TABLE 10

| | | RNA sequence (5′ → 3′), shown as |
|---|---|---|
| Name | Spacer sequence (5′ → 3′) | DNA |
| R2849 Bak1_nsd_ | CTGACTCCCAGCTCTGA | CTTTCAAGACTAATAGATTGCTCC |
| sg1 | CCC (SEQ ID NO: 449) | TTACGAGGAGACCTGACTCCCAG |
| | | CTCTGACCC (SEQ ID NO: 1203) |
| R2855 Bak1_nsd_ | CCATCTCCACCATCAGG | CTTTCAAGACTAATAGATTGCTCC |
| sg7 | AAC (SEQ ID NO: 455) | TTACGAGGAGACCCATCTCCACC |
| | | ATCAGGAAC (SEQ ID NO: 1209) |
| R3977 | TCCAGACGCCATCTTTCA | CTTTCAAGACTAATAGATTGCTCC |
| Bak1_exon1_sg1 | GG | TTACGAGGAGACTCCAGACGCCA |
| | (SEQ ID NO: 465) | TCTTTCAGG (SEQ ID NO: 1219) |
| R3978 | TGGTAAGAGTCCTCCTG | CTTTCAAGACTAATAGATTGCTCC |
| Bak1_exon1_sg2 | CCC | TTACGAGGAGACTGGTAAGAGTC |
| | (SEQ ID NO: 466) | CTCCTGCCC (SEQ ID NO: 1220) |
| R3979 | TTACAGCATCTTGGGTC | CTTTCAAGACTAATAGATTGCTCC |
| Bak1_exon3_sg1 | AGG | TTACGAGGAGACTTACAGCATCT |
| | (SEQ ID NO: 467) | TGGGTCAGG (SEQ ID NO: 1221) |
| R3980 | GGTCAGGTGGGCCGGCA | CTTTCAAGACTAATAGATTGCTCC |
| Bak1_exon3_sg2 | GCT | TTACGAGGAGACGGTCAGGTGGG |
| | (SEQ ID NO: 468) | CCGGCAGCT (SEQ ID NO: 1222) |
| R3981 | CTATCATTGGAGATGAC | CTTTCAAGACTAATAGATTGCTCC |
| Bak1_exon3_sg3 | ATT | TTACGAGGAGACCTATCATTGGA |
| | (SEQ ID NO: 469) | GATGACATT (SEQ ID NO: 1223) |
| R3982 | GAGATGACATTAACCGG | CTTTCAAGACTAATAGATTGCTCC |
| Bak1_exon3_sg4 | AGA | TTACGAGGAGACGAGATGACATT |
| | (SEQ ID NO: 470) | AACCGGAGA (SEQ ID NO: 1224) |
| R3983 | TGGAACTCTGTGTCGTAT | CTTTCAAGACTAATAGATTGCTCC |
| Bak1_exon3_sg5 | CT | TTACGAGGAGACTGGAACTCTGT |
| | (SEQ ID NO: 471) | GTCGTATCT (SEQ ID NO: 1225) |
| R3984 | CAGAATTTACTGGAGCA | CTTTCAAGACTAATAGATTGCTCC |
| Bak1_exon3_sg6 | GCT | TTACGAGGAGACCAGAATTTACT |
| | (SEQ ID NO: 472) | GGAGCAGCT (SEQ ID NO: 1226) |
| R3985 | ACTGGAGCAGCTGCAGC | CTTTCAAGACTAATAGATTGCTCC |
| Bak1_exon3_sg7 | CCA | TTACGAGGAGACACTGGAGCAGC |
| | (SEQ ID NO: 473) | TGCAGCCCA (SEQ ID NO: 1227) |
| R3986 | CCAGCTGTGGGCTGCAG | CTTTCAAGACTAATAGATTGCTCC |
| Bak1_exon3_sg8 | CTG | TTACGAGGAGACCCAGCTGTGGG |
| | (SEQ ID NO: 474) | CTGCAGCTG (SEQ ID NO: 1228) |
| R3987 | GTAGGCATTCCCAGCTG | CTTTCAAGACTAATAGATTGCTCC |
| Bak1_exon3_sg9 | TGG | TTACGAGGAGACGTAGGCATTCC |
| | (SEQ ID NO: 475) | CAGCTGTGG (SEQ ID NO: 1229) |
| R3988 | GTGAAGAGTTCGTAGGC | CTTTCAAGACTAATAGATTGCTCC |
| Bak1_exon3_sg10 | ATT | TTACGAGGAGACGTGAAGAGTTC |
| | (SEQ ID NO: 476) | GTAGGCATT (SEQ ID NO: 1230) |
| R3989 | ACCAAGATTGCCTCCAG | CTTTCAAGACTAATAGATTGCTCC |
| Bak1_exon3_sg11 | GTA | TTACGAGGAGACACCAAGATTGC |
| | (SEQ ID NO: 477) | CTCCAGGTA (SEQ ID NO: 1231) |
| R3990 | CCTCCAGGTACCCACCA | CTTTCAAGACTAATAGATTGCTCC |
| Bak1_exon3_sg12 | CCA | TTACGAGGAGACCCTCCAGGTAC |
| | (SEQ ID NO: 478) | CCACCACCA (SEQ ID NO: 1232) |

### Example 28

### Minimal Off-Target Effects of CasΦ Polypeptides

[0484] This example illustrates the off-target profiles of CasΦ.12 and Cas9. A major challenge in the translation of CRISPR/Cas9 technology into the clinic has been overcoming off-target effects. Off-target effects arise where a gRNA tolerates mismatches in complementarity of the gRNA and target sequence, and so the gRNA hybridizes to a sequence that is not the target sequence. Off-target effects are a source of major concern as it is important to avoid the production in unnecessary mutations that could be detrimental. In this study, CIRCLE-seq was performed to detect off-target sites (Tsai et al. 2017 Nature Methods). Sequencing was performed on genomic DNA extracted from CHO cells that had been transfected with CasΦ.12 polypeptide (SEQ ID NO: 107) and a gRNA targeting Fut8, CasΦ.12 polypeptide and a gRNA targeting BAX or Cas9 polypeptide and a gRNA targeting BAX. As shown in FIG. 23A, CasΦ.12 targeting Fut8 induced minimal off-target mutations. FIG. 23D shows the off-target mutations induced by Cas9 editing of Fut8. Similarly, CasΦ.12 targeting BAX induced minimal off-target mutations, as shown in FIG. 23B. Cas9 targeting BAX induced a higher percentage of off-targets mutations, as shown in FIG. 23C, compared to CasΦ.12. Cas9 targeting Bak1 also induced a higher percentage of off-targets mutations, as shown in FIG. 23E, compared to CasΦ.12, as shown in FIG. 23F.

[0485] In a further study, GUIDE-Seq was performed to detect off-target sites (Tsai et al. 2015 Nature Biotechnology). Sequencing was performed on genomic DNA extracted from HEK293 cells following delivery of either CasΦ.12 polypeptide or Cas9 polypeptide and a gRNA targeting human Fut8. As shown in FIG. 23G, no off target mutations were detected in the CasΦ.12 polypeptide sample. Whereas, several off-target mutations were detected in Cas9 polypeptide sample, as shown in FIG. 23H. Accordingly, this example demonstrates that CasΦ polypeptides have fewer off-target effects than Cas9.

### Example 29

### CasΦ Polypeptide-Mediated Genome Editing Via Homology Directed Repair (HDR)

[0486] The present example illustrates the ability of that CasΦ.12 to mediate HDR. In this study, CasΦ.12 polypeptide (SEQ ID NO: 107) was complexed with a gRNA (CUUUCAAGACUAAUAGAUUGCUCCUUACGAGGAGACGAGUCUCUCAGCUGGUAC AC (SEQ ID NO: 1432)) targeting the TRAC gene and delivered to T cells. RNP complexes were formed by a 10 minute incubation at room temperature. T cells were resuspended at 5×10⁵ cells/20 μL in electroporation solution (Lonza). T cells were nucleofected using the Amaxa P3 kit and Amaxa 4D Nucleofector with pulse code EH115. Immediately after nucleofection, 80 μl pre-warmed culture medium was added to each well. The cells were then left in the cuvette plate for 10 minutes before transfer to the culture plate. Cells were harvested and genomic DNA was extracted. The frequency of indel mutations HDR was determined and shown in FIG. 24A. The frequency of indel mutations and HDR was combined to determine the frequency of modification. Flow cytometry was also performed to determine the frequency of TRAC knockout, as assessed by the loss of CD3 at the cell surface. FIG. 24A shows CasΦ.12-mediated gene editing via the HDR pathway. FIG. 24B shows a schematic of the donor oligonucleotide. Thus, this example demonstrates the use of CasΦ polypeptides as robust genome editing tools.

### Example 30

### Multiplex Genome Editing with CasΦ Polypeptides

[0487] This example illustrates the ability of CasΦ RNP complexes to target multiple genes simultaneously. In this study, gRNAs targeting B2M or TRAC were incubated with CasΦ.12 polypeptides (SEQ ID NO: 107) for 10 minutes at room temperature to form RNP complexes. RNP complexes were formed with a variety of gRNAs with different modifications (unmodified, 2′-O-methyl on the last 3′ nucleotide of the crRNA (1me), 2′-O-methyl on the last two 3′ nucleotides of the crRNA (2me) and 2′-O-methyl on the last three 3′ nucleotides of the crRNA(3me)) and with different repeat and spacer sequences (20-20, which corresponds to 20 nucleotide repeat and 20 nucleotide spacer, and 20-17, which corresponds to 20 nucleotide repeat and 17 nucleotide spacer), as shown in TABLE 11. B2M targeting RNPs, TRAC targeting RNPs or B2M targeting RNPs and TRAC targeting RNPs were added to T cells. T cells were resuspended at 5×10⁵ cells/20 μL in Nucleofection P3 solution and an Amaxa 4D 96-well electroporation system with pulse code EH115 was used to nucleofect the cells. Immediately after nucleofection, 85 μl pre-warmed culture medium was added to each well. The cells were then left in the cuvette plate for 10 minutes before transfer to the culture plate. On Day 3, genomic DNA was extracted. On Day 5, cells were harvested for flow cytometry. Quantification of the percentage of B2M-negative and CD3-negative cells is shown in FIG. 25A for gRNAs with a repeat length of 20 nucleotides and a spacer length of 20 nucleotides, and in FIG. 25B for gRNAs with a repeat length of 20 nucleotides and a spacer length of 17 nucleotides. Corresponding flow cytometry panels can be seen in FIG. 25C for gRNAs of different repeat and spacer lengths and with different modifications.

[0488] In a further study, RNP complexes were formed using CasΦ.12 and modified gRNAs (unmodified, line, 2me, 3me, 2′-fluoro on the last 3′ nucleotide of the crRNA (1F), 2′-fluoro on the last two 3′ nucleotides of the crRNA (2F) and 2′-fluoro on the last three 3′ nucleotides of the crRNA (3F)) with different lengths of spacer sequences (20-20 and 20-17 as above) that target TRAC. T cells were nucleofected with RNP complexes (125 pmol) using the P3 primary cell nucleofection kit and an Amaxa 4D 96-well electroporation system with pulse code EHQ115. As shown in FIG. 25D, ˜90% editing efficiency was achieved using CasΦ.12 and modified gRNAs. FIG. 25E shows a flow cytometry plot illustrating ˜90% TRAC knockout in T cells after delivery of CasΦ.12 and modified gRNAs. This data further demonstrates the ability of CasΦ to mediate high efficiency genome editing.

TABLE 11

| | | | Repeat | Spacer | |
|---|---|---|---|---|---|
| | | | sequence | sequence | crRNA sequence |
| Name | Target | Modification | (5′ → 3′) | (5′ → 3′) | (5′ → 3′) |
| R3150 | B2M | Unmodified, | AUUGCUC | CAGUGGGGG | AUUGCUCCUUAC |
| 20-20 | Exon 2 | 2′OMe at last | CUUACGA | UGAAUUCAG | GAGGAGACCAG |
| | | 3′ base (1me) | GGAGAC | UG (SEQ ID | UGGGGGUGAAU |
| | | 2′OMe at last | (SEQ ID NO: | NO: 1434) | UCAGUG (SEQ ID |
| | | two 3′ bases | 1433) | | NO: 1435) |
| | | (2me) | | | |
| | | 2′OMe at last | | | |
| | | three 3′ bases | | | |
| | | (3me) | | | |
| R3042 | TRAC | Unmodified, | AUUGCUC | GAGUCUCUC | AUUGCUCCUUAC |
| 20-20 | Exon 1 | 1me | CUUACGA | AGCUGGUAC | GAGGAGACGAG |
| | | 2me | GGAGAC | AC (SEQ ID | UCUCUCAGCUGG |
| | | 3me | (SEQ ID NO: | NO: 1436) | UACAC (SEQ ID |
| | | | 1433) | | NO: 1437) |
| R3150 | B2M | Unmodified, | AUUGCUC | CAGUGGGGG | AUUGCUCCUUAC |
| 20-17 | Exon 2 | 1me | CUUACGA | UGAAUUCA | GAGGAGACCAG |
| | | 2me | GGAGAC | (SEQ ID NO: | UGGGGGUGAAU |
| | | 3me | (SEQ ID NO: | 1438) | UCA (SEQ ID NO: |
| | | | 1433) | | 1439) |
| R3042 | TRAC | Unmodified, | AUUGCUC | CAGUGGGGG | AUUGCUCCUUAC |
| 20-17 | Exon 1 | 1me | CUUACGA | UGAAUUCA | GAGGAGACGAG |
| | | 2me | GGAGAC | (SEQ ID NO: | UCUCUCAGCUGG |
| | | 3me | (SEQ ID NO: | 1440) | UA (SEQ ID NO: |
| | | | 1433) | | 1441) |

### Example 31

### CasΦ Polypeptides have an Extended Seed Region

[0489] The present example shows that CasΦ.12 has an extended seed region compared to Cas9 and does not tolerate mismatches in the complementarity of the spacer and target sequences within the first 1-16 nucleotides from the 5′ of the spacer sequence. In this study, CasΦ.12 (SEQ ID NO: 107) was complexed with a gRNA targeting TRAC gene and delivered to T cells. Spacer sequences contained a single mismatch at the position indicated in FIG. 26A or a mismatch at each of the two positions indicated in FIG. 26B. Mismatches were generated by substituting a purine for a purine (i.e. A to G and vice versa) and a pyrimidine for a pyrimidine (i.e. U to C and vice versa). RNP complexes were formed by a 10 minute incubation at room temperature. T cells were resuspended at 5×10⁵ cells/20 μL in electroporation solution (Lonza). Amaxa P3 kit and Amaxa 4D Nucleofector was used to nucleofect the T cells. Immediately after nucleofection, 80 μl pre-warmed culture medium was added to each well. The cells were then left in the cuvette plate for 10 minutes before transfer to the culture plate. Cells were harvested for extraction of genomic DNA to determine the frequency of indel mutations and for flow cytometry to determine the percentage of CD3 knockout cells. As shown in FIG. 26A, no indel mutations or CD3 knockout were detected when there was a single mismatch in the complementarity of the spacer and target sequences at positions 1-16 from the 5′ end of the spacer sequence. Similarly, no indels or CD3 knockout cells were detected when there was a double mismatch in the complementarity of the spacer and target sequences at positions 1-16 from the 5′ end of the spacer sequence as shown in FIG. 26B. The data shown in FIG. 26A and FIG. 26B demonstrate that CasΦ polypeptides do not tolerate mismatches in complementarity between the spacer sequence and target sequence in the 5′ 16 positions of the spacer. This region in which mismatches are not tolerated is known as the “seed region”. Thus the seed region of CasΦ.12 is the first 16 bases from the 5′ end of the spacer. In contrast, the seed region of Cas9 is much shorter and is reported to be only 5 nucleotides long (Wu et al., Quant Biol. 2014 June; 2(2): 59-70). Shorter seed regions result in increased likelihood of off-target effects because the likelihood of mismatches between the spacer and target occurring outside the seed region is increased. Accordingly, longer seed regions result in a reduced likelihood of off-target effects. The long seed region of CasΦ.12 is therefore advantageous over the short seed region of Cas9 and contributes to the reduced off-target effects of CasΦ.12. FIG. 26C and FIG. 26D provide schematics of the gRNAs with mismatches.

### Example 32

### Use of Modified Guide RNAs with CasΦ Polypeptides

[0490] This example illustrates the ability of CasΦ.12 to mediate genome editing in CHO cells with modified gRNAs. In this study, RNP complexes were formed using CasΦ.12 polypeptide (SEQ ID NO: 107) and a modified gRNA shown in TABLE 12. For nucleofection, 200 pmol RNP was mixed with 200,000 cells per well. CHO cells were resuspended in SF solution and Lonza setting FF-137 was used to nucleofect the cells. Genomic DNA was extracted 48 hours after transfection and the frequency of indel mutations was determined. As shown in FIG. 27A, several modified gRNAs with editing efficiency of ˜10% were identified. In a further study, additional modified gRNAs were tested. As shown in FIG. 27B, modified gRNAs with editing efficiency of up to 40-50% were identified.

[0491] gRNAs with phosphorothioate (PS) backbone modifications, 2′-fluoro (2′-F) and 2′-Methyl (2′OMe) sugar modifications are known to increase metabolic stability and binding affinity to RNA, and replacing RNA nucleotides with DNA generates gRNAs with highly efficient gene-editing activity compared to the natural crRNA (Rahdar et al, 2015, PNA; McMahon et al. 2017, Molecular Therapy Vol. 26 No 5).

TABLE 12

| SEQ | Name | | | | Name |
|---|---|---|---|---|---|
| ID | (FIG. | | | Full modified guide (repeat | (FIG. |
| NO. | 27A) | Modification | Position | and spacer) | 27A, B) |
| 1442 | R2466_ | 2′-O-Methyl | 2′OMe at 3 first | mC*mU*mU*UCAAGACUA | Synthe |
| | Mo | (2′OMe), 3′ | (5′) and last (3′) | AUAGAUUGCUCCUUACG | go_Mod |
| | 1 | phosphorothioate | bases, 3′ PS | AGGAGACAGGAAUACAU | |
| | | (PS) | bonds between | GGUACACmG*mU*mU* | |
| | | bonds | first 3 (5′) and | | |
| | | | last 2 (3′) bases | | |
| 1443 | R2466_ | 2′OMe, 3′, | 2′OMe at 3 first | mA*mA*mU*AGAUUGCUC | |
| | Mo | 25 nucleotide | (5′) and last (3′) | CUUACGAGGAGACAGGA | |
| | 2 | repeat | bases, 3′ PS | AUACAUGGUACACmG*m | |
| | | | bonds between | U*mU | |
| | | | first 3 (5′) and | | |
| | | | last 2 (3′) bases | | |
| 1444 | R2466_ | 2′-O- | 2′-O-Methoxy- | /52MOErA*/i2MOErA*/UA | |
| | Mo | methoxy- | ethyl bases at 2 | GAUUGCUCCUUACGAGG | |
| | 3 | ethyl bases | first (5′) and last | AGACAGGAAUACAUGGU | |
| | | | (3′) bases, 3′ PS | ACACG/i2MOErT/32MOErT | |
| | | | bonds between | | |
| | | | first 2 (5′) and | | |
| | | | last 2 (3′) bases | | |
| 1445 | R2466_ | 2′-Fluoro (2′- | First (5′) and last | /52FC/UUUCAAGACUAAU | |
| | Mo | F) | (3′) base | AGAUUGCUCCUUACGAG | |
| | 4 | | | GAGACAGGAAUACAUGG | |
| | | | | UACACGU/32FU/ | |
| 1446 | R2466_ | 2′-F, 25 | First (5′) and last | /52FA/AUAGAUUGCUCCU | 1F, 45F |
| | Mo | nucleotide | (3′) base | UACGAGGAGACAGGAAU | (25nt |
| | 5 | repeat | | ACAUGGUACACGU/32FU/ | R) |
| 1447 | R2466_ | 2′-F, PS, | First (5′) base | mC*U*UUCAAGACUAAUA | 1, 2 |
| | Mo | 2′OMe | 2′OMe, PS | GAUUGCUCCUUACGAGG | OMe- |
| | 6 | | between first | AGACAGGAAUACAUGGU | PS, 54, |
| | | | two(5′) bases, last | ACA/i2FC/i2FG/i2FU/32FU/ | 55, 56 |
| | | | 4 (3′) bases 2′-F | | ′F |
| 1448 | R2466_ | 2′-F, PS, | First (5′) base | mA*A*UAGAUUGCUCCUU | 1, 2 |
| | Mo | 2′OMe, 25 | 2′OMe, PS | ACGAGGAGACAGGAAUA | OMe- |
| | 7 | nucleotide | between first | CAUGGUACA/i2FC/i2FG/i2F | PS, 54, |
| | | repeat | two(5′) bases, last | U/32FU | 55, 56 |
| | | | 4 (3′)bases 2′-F | | ′F (25nt |
| | | | | | R) |
| 1449 | R2466_ | 2′-F | Last 4 (3′) bases | CUUUCAAGACUAAUAGA | 54, 55, |
| | Mo | | 2′-F | UUGCUCCUUACGAGGAG | 56 2′F |
| | 8 | | | ACAGGAAUACAUGGUAC | |
| | | | | A/i2FC/i2FG/i2FU/32FU | |
| 1450 | R2466_ | 2′-F, 25 | Last 4 (3′) bases | AAUAGAUUGCUCCUUAC | 54, 55, |
| | Mo | nucleotide | 2′-F | GAGGAGACAGGAAUACA | 56 2′F |
| | 9 | repeat | | UGGUACA/i2FC/i2FG/i2FU/ | (25 nt |
| | | | | 32FU | R) |
| 1451 | R2466_ | C3 Spacer, | First (5′) and last | CUUUCAAGACUAAUAGA | |
| | Mo | 21 nucleotide | (3′) base | UUGCUCCUUACGAGGAG | |
| | 10 | spacer | | ACAGGAAUACAUGGUAC | |
| | | | | ACGUUG | |
| 1452 | R2466_ | C3 Spacer, | First (5′) and last | AAUAGAUUGCUCCUUAC | |
| | Mo | 21 nucleotide | (3′) base | GAGGAGACAGGAAUACA | |
| | 11 | spacer, 25 | | UGGUACACGUUG | |
| | | nucleotide | | | |
| | | spacer | | | |
| 1453 | R2466_ | DNA bases + | 2′OMe at 3 | mC*mU*mU*UCAAGACUA | 1,2, 3 |
| | Mo | 2′OMe, PS | first(5′) bases, | AUAGAUUGCUCCUUACG | Ome- |
| | 12 | | last 4(3′) bases | AGGAGACAGGAAUACAU | PS 54, |
| | | | DNA | GGUACACGTT | 55, 56 |
| | | | | | DNA |
| 1454 | R2466_ | DNA | Last (3′) 4 | CUUUCAAGACUAAUAGA | |
| | Mo | nucleoside | nucleoside | UUGCUCCUUACGAGGAG | |
| | 13 | | | ACAGGAAUACAUGGUAC | |
| | | | | ACGTT | |
| 1455 | R2466_ | DNA | Nucleoside 1 of | CUUUCAAGACUAAUAGA | 1, 54, |
| | Mo | nucleosides | spacer and last | UUGCUCCUUACGAGGAG | 55, 56 |
| | 14 | | (3′) 4 nucleosides | ACAGGAAUACAUGGUAC | DNA |
| | | | | ACGTT | |
| 1456 | R2466_ | DNA | Nucleoside 8 of | CUUUCAAGACUAAUAGA | |
| | Mo | nucleosides | spacer and last | UUGCUCCUUACGAGGAG | |
| | 15 | | (3′) 4 nucleosides | ACAGGAAUACAUGGUAC | |
| | | | | ACGTT | |
| 1457 | R2466_ | DNA | Nucleoside 9 of | CUUUCAAGACUAAUAGA | |
| | Mo | nucleosides | spacer and last | UUGCUCCUUACGAGGAG | |
| | 16 | | (3′) 4 nucleosides | ACAGGAAUACAUGGUAC | |
| | | | | ACGTT | |
| 1458 | R2466_ | DNA | Nucleoside 1 and | CUUUCAAGACUAAUAGA | 1, 8, 54, |
| | Mo | nucleosides | 8 of spacer and | UUGCUCCUUACGAGGAG | 55, 56 |
| | 17 | | last (3′) 4 | ACAGGAAUACAUGGUAC | DNA |
| | | | nucleosides | ACGTT | |
| 1459 | R2466_ | DNA | Nucleoside 1 and | CUUUCAAGACUAAUAGA | |
| | Mo | nucleosides | 9 of spacer and | UUGCUCCUUACGAGGAG | |
| | 18 | | last (3′) 4 | ACAGGAAUACAUGGUAC | |
| | | | nucleosides | ACGTT | |
| 1460 | R2466_ | DNA | Nucleoside 1, 8 | CUUUCAAGACUAAUAGA | 1, 8, 9, |
| | Mo | nucleosides | and 9 of spacer | UUGCUCCUUACGAGGAG | 54, 55, |
| | 19 | | and last (3′) 4 | ACAGGAAUACAUGGUAC | 56 |
| | | | nucleosides | ACGTT | DNA |
| 1461 | R2466_ | DNA bases, | Nucleoside 1, 8 | AAUAGAUUGCUCCUUAC | |
| | Mo | 25 nucleotide | and 9 of spacer | GAGGAGACAGGAAUACA | |
| | 20 | repeat | and last (3′) 4 | UGGUACACGTT | |
| | | | nucleosides | | |
| 1462 | R2466_ | Poly-A-tail, | | AAUAGAUUGCUCCUUAC | |
| | Mo | repeat | | GAGGAGACAGGAAUACA | |
| | 21 | 25 nucleotide | | UGGUACACGUUAAAAAA | |
| | | | | A | |
| 1463 | R2466_ | DNA bases, | 2′OMe and PS at | mC*mU*mU*UCAAGACUA | 1, 2, 3 |
| | Mo | 2′OMe, PS | first 3(5′) bases, | AUAGAUUGCUCCUUACG | OMe, |
| | 22 | | DNA bases at 1,8 | AGGAGACAGGAAUACAU | 1, 8, 9, |
| | | | and 9 of spacer, | GGUACACGTT | 54, 55, |
| | | | PS at last 4 (3′) | | 56 |
| | | | bases | | DNA |
| 1464 | R2466_ | Unmodified, | | AAUAGAUUGCUCCUUAC | |
| | Mo | 25 nucleotide | | GAGGAGACAGGAAUACA | |
| | 23 | repeat | | UGGUACACGUU | |
| 1465 | R2466 | Unmodified | Unmodified | CUUUCAAGACUAAUAGA | |
| | (Unmodified) | | | UUGCUCCUUACGAGGAG | |
| | | | | ACAGGAAUACAUGGUAC | |
| | | | | ACGUU | |

### Example 33

### Optimization of Guide RNA Repeat and Spacer Length in CHO Cells

[0492] This example describes the optimization of repeat and spacer lengths of gRNAs for genome editing in CHO cells. In this study, RNP complexes were formed by incubating CasΦ.12 polypeptides (SEQ TD NO: 107) with a gRNA targeting Fut8 gene shown in TABLE 13. The gRNAs had different repeat lengths (20 to 36 nucleotides) or spacer lengths (15 to 30 nucleotides). Genomic DNA was extracted and the frequency of indel mutations was determined. For nucleofection, 250 pmol RNP was mixed with 200,000 cells per well. After 2 days, cells were collected and genomic DNA was extracted to determine the frequency of indel mutations. FIG. 28A shows the generation of indels by CasΦ.12 with gRNAs containing repeat sequences of different lengths. FIG. 28B the shows the generation of indels by CasΦ.12 with gRNAs containing spacer sequences of different lengths. The optimal gRNA for CasΦ.12-mediated genome editing in CHO cells was found to have a 20-nucleotide repeat length and a 17-nucleotide spacer length.

TABLE 13

| | | | Repeat | | |
|---|---|---|---|---|---|
| | Repeat | Spacer | sequence | Spacer sequence | crRNA sequence |
| Name | length | length | (5′ → 3′) | (5′ → 3′) | (5′ → 3′) |
| R3582 | 36 | 30 | CUUUCAAGA | AGGAAUACAU | CUUUCAAGACUAA |
| | | | CUAAUAGAU | GGUACACGUU | UAGAUUGCUCCUU |
| | | | UGCUCCUUA | GAAGAACAUU | ACGAGGAGACAGG |
| | | | CGAGGAGAC | (SEQ ID NO: | AAUACAUGGUACA |
| | | | (SEQ ID NO: | 1482) | CGUUGAAGAACAU |
| | | | 54) | | U (SEQ ID NO: 1499) |
| R3583 | 36 | 29 | CUUUCAAGA | AGGAAUACAU | CUUUCAAGACUAA |
| | | | CUAAUAGAU | GGUACACGUU | UAGAUUGCUCCUU |
| | | | UGCUCCUUA | GAAGAACAU | ACGAGGAGACAGG |
| | | | CGAGGAGAC | (SEQ ID NO: | AAUACAUGGUACA |
| | | | (SEQ ID NO: | 1483) | CGUUGAAGAACAU |
| | | | 54) | | (SEQ ID NO: 1500) |
| R3584 | 36 | 28 | CUUUCAAGA | AGGAAUACAU | CUUUCAAGACUAA |
| | | | CUAAUAGAU | GGUACACGUU | UAGAUUGCUCCUU |
| | | | UGCUCCUUA | GAAGAACA | ACGAGGAGACAGG |
| | | | CGAGGAGAC | (SEQ ID NO: | AAUACAUGGUACA |
| | | | (SEQ ID NO: | 1484) | CGUUGAAGAACA |
| | | | 54) | | (SEQ ID NO: 1501) |
| R3585 | 36 | 27 | CUUUCAAGA | AGGAAUACAU | CUUUCAAGACUAA |
| | | | CUAAUAGAU | GGUACACGUU | UAGAUUGCUCCUU |
| | | | UGCUCCUUA | GAAGAAC | ACGAGGAGACAGG |
| | | | CGAGGAGAC | (SEQ ID NO: | AAUACAUGGUACA |
| | | | (SEQ ID NO: | 1485) | CGUUGAAGAAC |
| | | | 54) | | (SEQ ID NO: 1502) |
| R3586 | 36 | 26 | CUUUCAAGA | AGGAAUACAU | CUUUCAAGACUAA |
| | | | CUAAUAGAU | GGUACACGUU | UAGAUUGCUCCUU |
| | | | UGCUCCUUA | GAAGAA (SEQ | ACGAGGAGACAGG |
| | | | CGAGGAGAC | ID NO: 1486) | AAUACAUGGUACA |
| | | | (SEQ ID NO: | | CGUUGAAGAA (SEQ |
| | | | 54) | | ID NO: 1503) |
| R3587 | 36 | 25 | CUUUCAAGA | AGGAAUACAU | CUUUCAAGACUAA |
| | | | CUAAUAGAU | GGUACACGUU | UAGAUUGCUCCUU |
| | | | UGCUCCUUA | GAAGA (SEQ | ACGAGGAGACAGG |
| | | | CGAGGAGAC | ID NO: 1487) | AAUACAUGGUACA |
| | | | (SEQ ID NO: | | CGUUGAAGA (SEQ |
| | | | 54) | | ID NO: 1504) |
| R3588 | 36 | 24 | CUUUCAAGA | AGGAAUACAU | CUUUCAAGACUAA |
| | | | CUAAUAGAU | GGUACACGUU | UAGAUUGCUCCUU |
| | | | UGCUCCUUA | GAAG (SEQ ID | ACGAGGAGACAGG |
| | | | CGAGGAGAC | NO: 1488) | AAUACAUGGUACA |
| | | | (SEQ ID NO: | | CGUUGAAG (SEQ ID |
| | | | 54) | | NO: 1505) |
| R3589 | 36 | 23 | CUUUCAAGA | AGGAAUACAU | CUUUCAAGACUAA |
| | | | CUAAUAGAU | GGUACACGUU | UAGAUUGCUCCUU |
| | | | UGCUCCUUA | GAA (SEQ ID | ACGAGGAGACAGG |
| | | | CGAGGAGAC | NO: 1489) | AAUACAUGGUACA |
| | | | (SEQ ID NO: | | CGUUGAA (SEQ ID |
| | | | 54) | | NO: 1506) |
| R3590 | 36 | 22 | CUUUCAAGA | AGGAAUACAU | CUUUCAAGACUAA |
| | | | CUAAUAGAU | GGUACACGUU | UAGAUUGCUCCUU |
| | | | UGCUCCUUA | GA (SEQ ID NO: | ACGAGGAGACAGG |
| | | | CGAGGAGAC | 1490) | AAUACAUGGUACA |
| | | | (SEQ ID NO: | | CGUUGA (SEQ ID |
| | | | 54) | | NO: 1507) |
| R3591 | 36 | 21 | CUUUCAAGA | AGGAAUACAU | CUUUCAAGACUAA |
| | | | CUAAUAGAU | GGUACACGUU | UAGAUUGCUCCUU |
| | | | UGCUCCUUA | G (SEQ ID NO: | ACGAGGAGACAGG |
| | | | CGAGGAGAC | 1491) | AAUACAUGGUACA |
| | | | (SEQ ID NO: | | CGUUG (SEQ ID |
| | | | 54) | | NO: 1508) |
| R3592 | 36 | 20 | CUUUCAAGA | AGGAAUACAU | CUUUCAAGACUAA |
| | | | CUAAUAGAU | GGUACACGUU | UAGAUUGCUCCUU |
| | | | UGCUCCUUA | (SEQ ID NO: | ACGAGGAGACAGG |
| | | | CGAGGAGAC | 1492) | AAUACAUGGUACA |
| | | | (SEQ ID NO: | | CGUU (SEQ ID |
| | | | 54) | | NO: 1509) |
| R3593 | 36 | 19 | CUUUCAAGA | AGGAAUACAU | CUUUCAAGACUAA |
| | | | CUAAUAGAU | GGUACACGU | UAGAUUGCUCCUU |
| | | | UGCUCCUUA | (SEQ ID NO: | ACGAGGAGACAGG |
| | | | CGAGGAGAC | 1493) | AAUACAUGGUACA |
| | | | (SEQ ID NO: | | CGU (SEQ ID |
| | | | 54) | | NO: 1510) |
| R3594 | 36 | 18 | CUUUCAAGA | AGGAAUACAU | CUUUCAAGACUAA |
| | | | CUAAUAGAU | GGUACACG | UAGAUUGCUCCUU |
| | | | UGCUCCUUA | (SEQ ID NO: | ACGAGGAGACAGG |
| | | | CGAGGAGAC | 1494) | AAUACAUGGUACA |
| | | | (SEQ ID NO: | | CG (SEQ ID NO: 1511) |
| | | | 54) | | |
| R3595 | 36 | 17 | CUUUCAAGA | AGGAAUACAU | CUUUCAAGACUAA |
| | | | CUAAUAGAU | GGUACAC | UAGAUUGCUCCUU |
| | | | UGCUCCUUA | (SEQ ID NO: | ACGAGGAGACAGG |
| | | | CGAGGAGAC | 1495) | AAUACAUGGUACA |
| | | | (SEQ ID NO: | | C (SEQ ID NO: 1512) |
| | | | 54) | | |
| R3596 | 36 | 16 | CUUUCAAGA | AGGAAUACAU | CUUUCAAGACUAA |
| | | | CUAAUAGAU | GGUACA (SEQ | UAGAUUGCUCCUU |
| | | | UGCUCCUUA | ID NO: 1496) | ACGAGGAGACAGG |
| | | | CGAGGAGAC | | AAUACAUGGUACA |
| | | | (SEQ ID NO: | | (SEQ ID NO: 1513) |
| | | | 54) | | |
| R3597 | 36 | 15 | CUUUCAAGA | AGGAAUACAU | CUUUCAAGACUAA |
| | | | CUAAUAGAU | GGUAC (SEQ ID | UAGAUUGCUCCUU |
| | | | UGCUCCUUA | NO: 1497) | ACGAGGAGACAGG |
| | | | CGAGGAGAC | | AAUACAUGGUAC |
| | | | (SEQ ID NO: | | (SEQ ID NO: 1514) |
| | | | 54) | | |
| R3598 | 35 | 20 | UUUCAAGAC | AGGAAUACAU | UUUCAAGACUAAU |
| | | | UAAUAGAUU | GGUACACGUU | AGAUUGCUCCUUA |
| | | | GCUCCUUAC | (SEQ ID NO: | CGAGGAGACAGGA |
| | | | GAGGAGAC | 1498) | AUACAUGGUACAC |
| | | | (SEQ ID NO: | | GUU (SEQ ID |
| | | | 1466) | | NO: 1515) |
| R3599 | 34 | 20 | UUCAAGACU | AGGAAUACAU | UUCAAGACUAAUA |
| | | | AAUAGAUUG | GGUACACGUU | GAUUGCUCCUUAC |
| | | | CUCCUUACG | (SEQ ID NO: | GAGGAGACAGGAA |
| | | | AGGAGAC | 1498) | UACAUGGUACACG |
| | | | (SEQ ID NO: | | UU (SEQ ID NO: 1516) |
| | | | 1467) | | |
| R3600 | 33 | 20 | UCAAGACUA | AGGAAUACAU | UCAAGACUAAUAG |
| | | | AUAGAUUGC | GGUACACGUU | AUUGCUCCUUACG |
| | | | UCCUUACGA | (SEQ ID NO: | AGGAGACAGGAAU |
| | | | GGAGAC (SEQ | 1498) | ACAUGGUACACGU |
| | | | ID NO: 1468) | | U (SEQ ID NO: 1517) |
| R3601 | 32 | 20 | CAAGACUAA | AGGAAUACAU | CAAGACUAAUAGA |
| | | | UAGAUUGCU | GGUACACGUU | UUGCUCCUUACGA |
| | | | CCUUACGAG | (SEQ ID NO: | GGAGACAGGAAUA |
| | | | GAGAC (SEQ | 1498) | CAUGGUACACGUU |
| | | | ID NO: 1469) | | (SEQ ID NO: 1518) |
| R3602 | 31 | 20 | AAGACUAAU | AGGAAUACAU | AAGACUAAUAGAU |
| | | | AGAUUGCUC | GGUACACGUU | UGCUCCUUACGAG |
| | | | CUUACGAGG | (SEQ ID NO: | GAGACAGGAAUAC |
| | | | AGAC (SEQ ID | 1498) | AUGGUACACGUU |
| | | | NO: 1470) | | (SEQ ID NO: 1519) |
| R3603 | 30 | 20 | AGACUAAUA | AGGAAUACAU | AGACUAAUAGAUU |
| | | | GAUUGCUCC | GGUACACGUU | GCUCCUUACGAGG |
| | | | UUACGAGGA | (SEQ ID NO: | AGACAGGAAUACA |
| | | | GAC (SEQ ID | 1498) | UGGUACACGUU |
| | | | NO: 1471) | | (SEQ ID NO: 1520) |
| R3604 | 29 | 20 | GACUAAUAG | AGGAAUACAU | GACUAAUAGAUUG |
| | | | AUUGCUCCU | GGUACACGUU | CUCCUUACGAGGA |
| | | | UACGAGGAG | (SEQ ID NO: | GACAGGAAUACAU |
| | | | AC (SEQ ID | 1498) | GGUACACGUU (SEQ |
| | | | NO: 1472) | | ID NO: 1521) |
| R3605 | 28 | 20 | ACUAAUAGA | AGGAAUACAU | ACUAAUAGAUUGC |
| | | | UUGCUCCUU | GGUACACGUU | UCCUUACGAGGAG |
| | | | ACGAGGAGA | (SEQ ID NO: | ACAGGAAUACAUG |
| | | | C (SEQ ID NO: | 1498) | GUACACGUU (SEQ |
| | | | 1473) | | ID NO: 1522) |
| R3606 | 27 | 20 | CUAAUAGAU | AGGAAUACAU | CUAAUAGAUUGCU |
| | | | UGCUCCUUA | GGUACACGUU | CCUUACGAGGAGA |
| | | | CGAGGAGAC | (SEQ ID NO: | CAGGAAUACAUGG |
| | | | (SEQ ID NO: | 1498) | UACACGUU (SEQ ID |
| | | | 1474) | | NO: 1523) |
| R3607 | 26 | 20 | UAAUAGAUU | AGGAAUACAU | UAAUAGAUUGCUC |
| | | | GCUCCUUAC | GGUACACGUU | CUUACGAGGAGAC |
| | | | GAGGAGAC | (SEQ ID NO: | AGGAAUACAUGGU |
| | | | (SEQ ID NO: | 1498) | ACACGUU (SEQ ID |
| | | | 1475) | | NO: 1524) |
| R3608 | 25 | 20 | AAUAGAUUG | AGGAAUACAU | AAUAGAUUGCUCC |
| | | | CUCCUUACG | GGUACACGUU | UUACGAGGAGACA |
| | | | AGGAGAC | AGGAAUACAU | GGAAUACAUGGUA |
| | | | (SEQ ID NO: | GGUACACGUU | CACGUU (SEQ ID |
| | | | 1476) | (SEQ ID NO: | NO: 1525) |
| | | | | 2487) | |
| R3609 | 24 | 20 | AUAGAUUGC | AGGAAUACAU | AUAGAUUGCUCCU |
| | | | UCCUUACGA | GGUACACGUU | UACGAGGAGACAG |
| | | | GGAGAC (SEQ | AGGAAUACAU | GAAUACAUGGUAC |
| | | | ID NO: 1477) | GGUACACGUU | ACGUU (SEQ ID |
| | | | | (SEQ ID NO: | NO: 1526) |
| | | | | 2487) | |
| R3610 | 23 | 20 | UAGAUUGCU | AGGAAUACAU | UAGAUUGCUCCUU |
| | | | CCUUACGAG | GGUACACGUU | ACGAGGAGACAGG |
| | | | GAGAC (SEQ | AGGAAUACAU | AAUACAUGGUACA |
| | | | ID NO: 1478) | GGUACACGUU | CGUU (SEQ ID |
| | | | | (SEQ ID NO: | NO: 1527) |
| | | | | 2487) | |
| R3611 | 22 | 20 | AGAUUGCUC | AGGAAUACAU | AGAUUGCUCCUUA |
| | | | CUUACGAGG | GGUACACGUU | CGAGGAGACAGGA |
| | | | AGAC (SEQ ID | AGGAAUACAU | AUACAUGGUACAC |
| | | | NO: 1479) | GGUACACGUU | GUU (SEQ ID |
| | | | | (SEQ ID NO: | NO: 1528) |
| | | | | 2487) | |
| R3612 | 21 | 20 | GAUUGCUCC | AGGAAUACAU | GAUUGCUCCUUAC |
| | | | UUACGAGGA | GGUACACGUU | GAGGAGACAGGAA |
| | | | GAC (SEQ ID | AGGAAUACAU | UACAUGGUACACG |
| | | | NO: 1480) | GGUACACGUU | UU (SEQ ID NO: 1529) |
| | | | | (SEQ ID NO: | |
| | | | | 2487) | |
| R3613 | 20 | 20 | AUUGCUCCU | AGGAAUACAU | AUUGCUCCUUACG |
| | | | UACGAGGAG | GGUACACGUU | AGGAGACAGGAAU |
| | | | AC (SEQ ID | AGGAAUACAU | ACAUGGUACACGU |
| | | | NO: 1481) | GGUACACGUU | U (SEQ ID NO: 1530) |
| | | | | (SEQ ID NO: | |
| | | | | 2487) | |

### Example 34

### Identification of Optimal Guide RNAs for CasΦ Polypeptide-Mediated Genome Editing in Primary Cells

[0493] The present example shows identification of the best performing gRNAs that target TRAC, B2M and programmed cell death protein 1 (PD1) in T cells. In this study, CasΦ.12 polypeptides (SEQ ID NO: 107) were incubated with different gRNAs (shown in Table 14) at room temperature for 10 minutes to form RNP complexes. T cells were resuspended at 5×10⁵ cells/20 μL in electroporation solution (Lonza) and an Amaxa 4D Nucleofector with pulse code EH115 was used to nucleofect the cells Immediately after nucleofection, 80 μl pre-warmed culture medium was added to each well. The cells were then left in the cuvette plate for 10 minutes before transfer to the culture plate. After 48 hours, DNA was extracted from half of the cells and PCR was performed to detect the frequency of indels. The rest of the cells were cultured until Day 5, and were then collected for flow cytometry to detect the frequency of TRAC or B2M knockout. FIG. 29A and FIG. 29B show exemplary gRNAs for targeting TRAC. FIG. 29B and FIG. 29C show exemplary gRNAs for targeting B2M. FIG. 29E shows exemplary gRNAs for targeting PD1. Additionally, this example demonstrates that a guide RNAs targeting a non-coding region can mediate gene knockout. For example, R3007, R2995, R2992 and R3014 target non-coding regions of the PD1 gene. The screening for gRNAs targeting TRAC is shown in FIG. 29F and for gRNAs targeting B2M is shown in FIG. 29H. Flow cytometry plots of exemplary gRNAs targeting TRAC are shown in FIG. 29G and of exemplary gRNAs targeting B2M in FIG. 29I.

TABLE 14

| | Tar- | |
|---|---|---|
| Name | get | Spacer sequence (5′ → 3′) |
| R3041 | TRAC | UCCCACAGAUAUCCAGAACC (SEQ ID NO: 2470) |
| R3042 | TRAC | GAGUCUCUCAGCUGGUACAC (SEQ ID NO: 1436) |
| R3043 | TRAC | AGAGUCUCUCAGCUGGUACA (SEQ ID NO: 2471) |
| R3061 | TRAC | AAGUCCAUAGACCUCAUGUC (SEQ ID NO: 2472) |
| R3063 | TRAC | AAGAGCAACAGUGCUGUGGC (SEQ ID NO: 2473) |
| R3066 | TRAC | GUUGCUCCAGGCCACAGCAC (SEQ ID NO: 2474) |
| R3068 | TRAC | GCACAUGCAAAGUCAGAUUU (SEQ ID NO: 2475) |
| R3069 | TRAC | GCAUGUGCAAACGCCUUCAA (SEQ ID NO: 2476) |
| R3081 | TRAC | CUAAAAGGAAAAACAGACAU (SEQ ID NO: 2477) |
| R3141 | TRAC | CUCGACCAGCUUGACAUCAC (SEQ ID NO: 2478) |
| R3088 | B2M | AUAUAAGUGGAGGCGUCGCG (SEQ ID NO: 2479) |
| R3091 | B2M | GGGCCGAGAUGUCUCGCUCC (SEQ ID NO: 1429) |
| R3094 | B2M | UGGCCUGGAGGCUAUCCAGC (SEQ ID NO: 2480) |
| R3119 | B2M | AAGUUGACUUACUGAAGAAU (SEQ ID NO: 2481) |
| R3132 | B2M | AGCAAGGACUGGUCUUUCUA (SEQ ID NO: 2482) |
| R3149 | B2M | AGUGGGGGUGAAUUCAGUGU (SEQ ID NO: 2483) |
| R3150 | B2M | CAGUGGGGGUGAAUUCAGUG (SEQ ID NO: 1434) |
| R3155 | B2M | GGCUGUGACAAAGUCACAUG (SEQ ID NO: 2484) |
| R3156 | B2M | GUCACAGCCCAAGAUAGUUA (SEQ ID NO: 2485) |
| R3157 | B2M | UCACAGCCCAAGAUAGUUAA (SEQ ID NO: 2486) |
| R2946 | PD1 | UGUGACACGGAAGCGGCAGU (SEQ ID NO: 263) |
| R2992 | PD1 | GGGGCUGGUUGGAGAUGGCC (SEQ ID NO: 309) |
| R2995 | PD1 | GAGCAGCCAAGGUGCCCCUG (SEQ ID NO: 312) |
| R3007 | PD1 | ACACAUGCCCAGGCAGCACC (SEQ ID NO: 324) |
| R3014 | PD1 | AGGCCCAGCCAGCACUCUGG (SEQ ID NO: 331) |

### Example 35

### RNP and mRNA Delivery of CasΦ Polypeptides

[0494] This example illustrates that CasΦ.12 can be delivered to primary cells as mRNA or as an RNP complex. In one study, RNP complexes were formed using CasΦ.12 protein (0, 100, 200 or 400 pmol) (SEQ ID NO: 107) and gRNAs (0, 400 or 800 pmol) targeting B2M or TRAC. RNP complexes were added to T cells. T cells were nucleofected using the Amaxa P3 kit and Amaxa 4D 96-well electroporation system with pulse code EH115. Cells were harvested for flow cytometry to determine the percentage of B2M or TRAC knockout cells, and genomic DNA was extracted to detect the frequency of indel mutations. As shown in FIG. 30A, a distinct population of B2M-negative cells was detected in T cells transfected with CasΦ.12 RNP complex targeting B2M. A distinct population of TRAC-negative cells was detected in in T cells transfected with CasΦ.12 RNP complex targeting TRAC, and shown in FIG. 30B. Quantification of the percentage of B2M knockout cells is shown in FIG. 30C and quantification of the percentage of TRAC knockout cells is shown in FIG. 30D. A high frequency of indel mutations was also seen after delivery of RNP complexes. As shown in FIG. 30E, ˜55% indel mutations was detected when RNP complexes targeting B2M were formed using 400 pmol protein and 800 pmol guide RNA. A similar frequency of indel mutations was detected when RNP complexes targeting TRAC were formed using the same conditions, as illustrated in FIG. 30F.

[0495] In a second study, CasΦ.12 mRNA was delivered to T cells with a gRNA targeting the B2M gene. For nucleofection, T cells were resuspended in BTXpress electroporation medium (5×10⁵ cells per well) and mixed with CasΦ.12 mRNA and 500 pmol gRNA. Cells were collected on Day 2 for extraction of genomic DNA, and the frequency of indel mutations was determined. As shown in FIG. 30G, delivery of CasΦ.12 mRNA and gRNA resulted in a high frequency of indel mutations. This was at a comparable level to genome editing with delivery of Cas9 mRNA. Further data from this study are shown in FIG. 30I and FIG. 30J. FIG. 30I shows the frequency of indel mutations and functional knockout, as assessed by flow cytometry, of the B2M gene induced by either CasΦ.12 or Cas9 targeting the same site. FIG. 30J shows the distribution of the size of indel mutations induced by CasΦ.12 or Cas9 determined by NGS analysis. CasΦ.12 predominantly induced larger deletion mutations whereas Cas9 induced mostly small 1 bp InDels. This data further confirms the ability of CasΦ.12 to mediate genome editing at the B2M locus.

### Example 36

### gRNA Processing by CasΦ Polypeptides in Mammalian Cells

[0496] This example illustrates the ability of CasΦ polypeptides to process gRNA in mammalian cells. In this study, HEK293T cells were transfected with crRNA and expression plasmids encoding CasΦ.12 (SEQ ID NO: 107) using lipofectamine on day 0. The crRNA had the repeat sequence (the region that binds to CasΦ.12) CTTTCAAGACTAATAGATTGCTCCTTACGAGGAGAC (SEQ ID NO: 54). To determine the nature of the crRNAs expressed in the HEK293T cells, the microRNA species in the HEK293T cells were analyzed by next generation sequencing. After 2 days, miRNA was extracted using the mirVANA kit. RNA was treated with recombinant Shrimp Alkaline Phosphatase (rSAP) to remove all the phosphates from the 5′ and 3′ ends of the RNA. PNK phosphorylation was then performed to add phosphate back to the 5′ ends in preparation for adaptor ligation to the RNA. RNA was then mixed with 3′ SR Adaptor for Illumina, followed by 3′ ligation enzyme mix and incubated for 1 hour at 25° C. in a thermal cycler. The reverse transcription primer was then hybridized to prevent adaptor-dimer formation. The SR RT primer hybridizes to the excess of 3′ SR Adaptor (that remains free after the 3′ ligation reaction) and transforms the single stranded DNA adaptor into a double-stranded DNA molecule. Double-stranded DNAs are not substrates for ligation mediated by T4 RNA Ligase 1 and therefore do not ligate to the 5′ SR. The RNA-ligation mixture from the previous step was mixed with SR RT primer for Illumina and placed in a thermocycler for the following program: 5 minutes at 75° C., 15 minutes at 37° C., 15 minutes at 25° C., hold at 4° C. The RNA-ligation mixture was then incubated with 5′ SR adaptor for 1 hour at 25° C. in a thermal cycler. Finally, RNA was reverse transcribed using ProtoScript II Reverse Transcriptase and amplified for PCR. The sample was then analyzed by next generation sequencing.

[0497] As shown in FIG. 31 the major crRNA molecule detected by sequence analysis was 24 nucleotides long (ATAGATTGCTCCTTACGAGGAGAC (SEQ ID NO: 1531) which is 12 nucleotides shorter than the full length repeat sequence (CTTTCAAGACTAATAGATTGCTCCTTACGAGGAGAC (SED ID NO: 54)) that was delivered to the HEK293T cells. This demonstrates how CasΦ.12 can process the repeat region of its crRNA in mammalian cells.

### Example 37

### CasΦ Polypeptide Cleavage Generates 5′ Overhangs

[0498] This example illustrates different CasΦ polypeptide-induced cleavage patterns. In this study, CasΦ polypeptides (CasΦ.12, CasΦ.45, CasΦ.43, CasΦ.39. CasΦ.37, CasΦ.33, CasΦ.32, CasΦ.30, CasΦ.28, CasΦ.25, CasΦ.24, CasΦ.22, CasΦ.20, CasΦ.18) were complexed with a crRNA to form RNPs. The RNPs were then used in cleavage reactions with plasmid DNA comprising a target sequence and a PAM (GTTG). The cleavage reaction was carried out at 37° C. and had a duration of 15 minutes. The cleavage products were then analyzed by gel electrophoresis. As shown in FIG. 32A, the majority of CasΦ polypeptides generated a linear product from a plasmid target, whilst some CasΦ polypeptides introduced nicks into the plasmid DNA.

[0499] FIG. 32B shows a schematic of the cut sites on the target and non-target strand of a double-stranded target nucleic acid. The nature of the cleavage patterns resulting from the location of the cut sites on the target and non-target strands was investigated by sequence analysis, as shown in FIG. 32C and represented in FIG. 32D. These data show that the cleavage pattern following CasΦ polypeptide mediated cleavage of target nucleic acid is a staggered cut comprising 5′ overhangs. FIG. 32E shows a table of cut sites and overhangs of the different CasΦ polypeptides. The “#bp overlap” corresponds to the length of the 5′ overhang for each CasΦ polypeptide. For comparison, Cpf1 introduces a staggered double-stranded DNA break with a 4- or 5-nucleotide 5′ overhang (Zetsche et. al 2015 Cell).

### Example 38

### Multiplex Genome Editing with CasΦ Polypeptides

[0500] This example illustrates the ability of CasΦ RNP complexes to knockout multiple genes simultaneously. In this study, gRNAs targeting B2M, TRAC and PDCD1 (provided in Table 15) were incubated with CasΦ.12 (SEQ ID NO: 12) for 10 minutes at room temperature to form B2M, TRAC, and PDC1 targeting RNPs, respectively. The B2M targeting RNPs, TRAC targeting RNPs, PDCD1 targeting RNPs and combinations thereof were added to T cells. T cells were resuspended at 5×10⁵ cells/20 μL in Nucleofection P3 solution and an Amaxa 4D 96-well electroporation system with pulse code EH115 was used to nucleofect the cells. Immediately after nucleofection, 85 μl pre-warmed culture medium was added to each well. The cells were then left in the cuvette plate for 10 minutes before transfer to the culture plate. On Day 3, genomic DNA was extracted and sent for NGS sequencing and the % indel was measured with a positive % indel being indicative of % knockout. On Day 5, cells were harvested for flow cytometry and the % knockout was measured with fluorescently labeled antibodies to TRAC and B2M (antibody to PDCD1 unavailable). % indel results are presented in Table 16 and flow cytometry data presented in Table 17. Corresponding flow cytometry panels are shown in FIG. 33.

TABLE 15

| Descrip- | SEQ | |
|---|---|---|
| tion | ID | Sequence |
| B2M | 1532 | CUUUCAAGACUAAUAGAUUGCUCCUUACGAGGAG |
| gRNA | | ACAGCAAGGACUGGUCUUUCUA |
| (R3132) | | |
| TRAC | 1432 | CUUUCAAGACUAAUAGAUUGCUCCUUACGAGGAG |
| gRNA | | ACGAGUCUCUCAGCUGGUACAC |
| (R3042) | | |
| PDCD1 | 791 | CUUUCAAGACUAAUAGAUUGCUCCUUACGAGGAG |
| gRNA | | ACUAGCACCGCCCAGACGACUG |
| (R2925) | | |

TABLE 16

| Description | RNP Guide ID(s) | Amplicon | % INDEL |
|---|---|---|---|
| TRAC single KO | R3042 | TRAC | 77.6% |
| B2M single KO | R3132 | B2M | 85.5% |
| PDCD1 single KO | R2925 | PDCD1 | 44.6% |
| TRAC, B2M double KO | R3132 & R3042 | TRAC | 58.8% |
| TRAC, B2M double KO | R3132 & R3042 | B2M | 61.2% |
| TRAC, B2M, PDCD1 triple | R3132, R3042, | TRAC | 59.2% |
| KO | R2925 | | |
| TRAC, B2M, PDCD1 triple | R3132, R3042, | B2M | 69.4% |
| KO | R2925 | | |
| TRAC, B2M, PDCD1 triple | R3132, R3042, | PDCD1 | 42.1% |
| KO | R2925 | | |

TABLE 17

| | B2M+ | B2M+, | B2M−, | B2M−, |
|---|---|---|---|---|
| gRNA | CD3− | CD3+ | CD3+ | CD3− |
| TRAC | 94 | 5.91 | 0.00418 | 0.1 |
| B2M | 0.051 | 8.65 | 90.7 | 0.59 |
| TRAC + B2M | 4.2 | 4.89 | 4.01 | 86.9 |
| TRAC + B2M + | 4.74 | 14.1 | 4.33 | 76.8 |
| PDCD1 | | | | |

### Example 39

### Genome Editing with CasΦ Polypeptides Mediates Efficient Editing of PCSK9 in Mouse Hepatoma Cells

[0501] The present example shows that CasΦ.12 RNP complexes are highly effective at mediating editing the PCSK9 gene. In this study, 95 CasΦ gRNAs targeting PCSK9 (sequences shown in Tables E and Q), were incubated with CasΦ.12 (SEQ ID NO: 12) to form RNP complexes. Positive control RNP complexes were also formed using Cas9 and a gRNA. Hepa1-6 mouse hepatoma cells (100,000 cells) were resuspended in SF solution (Lonza) and nucleofected with CasΦ RNPs (250 pmoles) or the control Cas9 RNPs (60 pmoles) using program CM-137 or CM-148 (Amaxa nucleofector). Cells were collected after 48 hours, genomic DNA was extracted and the frequency of indel mutations was determined using NGS. FIG. 34 shows that CasΦ.12 is a highly effective genome editing tool, with an indel frequency of up to 48% induced by CasΦ.12 RNP complexes. Whereas, the maximum indel frequency induced by Cas9 was only about 22%.

### Example 40

### Adeno-Associated Virus Encoding CasΦ.12 Facilitates Genome Editing

[0502] This example shows that a CasΦ.12 plasmid, including both CasΦ polypeptide sequence and gRNA sequence, sometimes called an all-in-one, can be used to facilitate genome editing. In this study, the crRNAs (sequences shown in Tables E and Q) from the initial RNP screen were chosen and truncations of these crRNAs were generated with repeat lengths of 36, 25, 20, or 19 nucleotides in combination with spacer lengths of 20, 17, or 16 nucleotides. Each crRNA was then cloned into an AAV vector consisting of U6 promoter to drive crRNA expression, intron-less EF1alpha short (EFS) promoter driving CasΦ expression, PolyA signal, and 1 kb stuffer sequence genomic. Hepa1-6 mouse hepatoma cells were nucleofected with 10 μg of each AAV plasmid. After 72 hours, genomic DNA was extracted and the frequency of indel mutations was determined using NGS. FIG. 35A shows a plasmid map of the adeno-associated virus (AAV) encoding the CasΦ polypeptide sequence and gRNA sequence. FIG. 35D shows the frequency of CasΦ.12 induced indel mutations in Hepa1-6 cells transduced with 10 μg of each AAV plasmid. gRNAs containing repeat sequences of 19, 20, 25 or 36 nucleotides and spacer sequences of 16, 17 or 20 nucleotides were used in this study. In the graph legend, repeat and spacer lengths are indicated as the number of nucleotides in the repeat followed by the number of nucleotides in the spacer, eg 20-17 has a repeat length of 20 nucleotides and a spacer length of 17 nucleotides. The frequency of indel mutations is comparable to that of Cas9. FIG. 35E and FIG. 35F show the frequency of CasΦ.12 induced indel mutations with different gRNA containing repeat and spacer sequences of different lengths (indicated as in FIG. 35F with repeat length followed by spacer length). This study demonstrates that the all-in-one vector method of CasΦ.12 mediated genome editing is robust across different gRNA sequences and with gRNAs of different repeat and spacer lengths.

[0503] AAV vectors are a leading platform for delivery of gene therapy for treatment of human disease (Wang et al., (2019) Nature Reviews Drug Discovery). One of the limitations of viral vector delivery of CRISPR/Cas9 is the size of Cas9. AAVs are roughly 20 nm, allowing for 4.5 kb genomic material to be packaged within it. This makes packaging Cas9 and a gRNA (˜4.2 kB) with any additional elements such as multiple gRNAs or a donor polynucleotide for HDR challenging (Lino et al., (2018), Drug Delivery). Whereas CasΦ is much smaller, allowing all of the components of the CRISPR system to be packaged in one viral vector.

### Example 41

### Optimization of Lipid Nanoparticle Delivery of CasΦ

[0504] This example describes the optimization of lipid nanoparticle (LNP) delivery of CasΦ mRNA and gRNA. In this study, the encapsulation efficiency of LNPs was optimized by testing different amine group to phosphate group ratio (N/P) of LNPs containing CasΦ mRNA and gRNA. An LNP kit from Precision Nanosystems (GenVoy-ILM™) was used to generate LNPs with different N/P ratios. LNPs were then dropped into HEK293T cells. Genomic DNA was extracted and the frequency of indel mutations was determined using NGS. The gRNA used in this study was R2470 with 2′ O-methyl on the first three 5′ and last three 3′ nucleotides and phosphorothioate bonds in between the first three 5′ nucleotides and in between the last two 3′ nucleotides. The sequence of R2470 from 5′ to 3′ is 42256-779_601_SL. The mRNA was generated using T7 messenger mRNA IVT kit. As shown in FIG. 36, indel mutations were detected following the use of a range of N/P ratios.

[0505] LNPs are one of the most clinically advanced non-viral delivery systems for gene therapy. LNPs have many properties that make them ideal candidates for delivery of nucleic acids, including ease of manufacture, low cytotoxicity and immunogenicity, high efficiency of nucleic acid encapsulation and cell transfection, multidosing capabilities and flexibility of design (Kulkarni et al., (2018) Nucleic Acid Therapeutics).

### Example 42

### Genome Editing in Hematopoietic Stem Cells with CasΦ Polypeptides

[0506] This example demonstrates CasΦ-mediated genome editing of CD34+ hematopoietic stem cells (HSCs). HSCs are stem cells that differentiate to give rise blood cells, such as T and B lymphocytes, erythrocytes, monocytes and macrophages. HSCs are important cells for future stem cell therapies as they have the potential to be used to treat genetic blood cell diseases (Morgan et al. (2017), Cell Stem Cell).

[0507] In this study human CD34+ cells were grown in XVIVO10 media (+5% FBS, +1X CC 110) for three days. On the third day, the cells were nucleofected using the Lonza P3 kit with either RNP containing CasΦ.12 polypeptides complexed with B2M-targeting guide R3132 (42256-779_601_SL), or a mixture of CasΦ.12 mRNA with B2M-targeting guide. Cells were collected after 3 days, genomic DNA was purified and the frequency of indel mutations at the B2M locus was analyzed by NGS. As shown in FIG. 37, CasΦ.12 is an effective tool for genome editing when CasΦ.12 is delivered to cells as CasΦ.12 RNP complexes or CasΦ.12 mRNA.

[0508] This example illustrates the utility of CasΦ polypeptides as genome editing tools in stem cells, such as HSCs.

### Example 43

### Genome Editing in Induced Pluripotent Stem Cells with CasΦ Polypeptides

[0509] This example demonstrates CasΦ-mediated genome editing of induced pluripotent stem cells (iPSCs). iPSCs are pluripotent stem cells that are generated from somatic cells. They can propagate indefinitely and give rise to any cell type in the body. These features make iPSCs a powerful tool for researching human disease and provide a promising prospect for cell therapies for a range of medical conditions. iPSCs can be generated in a patient-specific manner and used in autologous transplant, thereby overcoming complications of rejection by the host immune system (Moradi et al. (2019), Stem Cell Research & Therapy).

[0510] In this study, high quality WTC-11 iPSCs were harvested as single cells using Accutase treatment for 5 minutes. RNP complexes were formed using CasΦ.12 polypeptides and gRNAs targeting either the B2M locus or targeting a CIITA locus (sequences shown in Table 19). RNP complexes were formed using 2:1 gRNA:CasΦ.12 RNP (1000 pmol gRNA+500 pmol Cas120.12) and incubating at room temperature for approximately 15 minutes. WTC-11 iPSCs (200,000 cells) were resuspended in 20 uL of P3 nucleofection solution per reaction and 40 uL of cell suspension was added to each RNP tube. Half of the volume of each RNP/cell suspension mixture was added to the Lonza 96 well shuttle and nucleofection was performed using the program CD118. To recover the transfected cells, 80 μL of warm StemFlex media supplemented with 2 μM of Thiazovivin was added to the wells of the shuttle. The entire volume of the shuttle well was transferred to a 96 well plate previously coated with 0.337 mg/mL Matrigel containing 100 μL of 2 μM of Thiazovivin. Cells were allowed to recover for 24 hours in 37° C. incubator with humidity control. Cells were confluent 48 hours post-transfection, and single-cell passaged using Accutase. Genomic DNA was extracted using KingFisher Tissue and DNA kit. NGS library preparation was performed using in house protocols and the frequency of indel mutations was quantified using Crispresso. As shown in FIG. 38, effective genome editing at the B2M and CIITA loci was achieved with CasΦ.12 RNP complexes in iPSCs.

[0511] This example demonstrates the utility of CasΦ as genome editing tools in iPSCs.

TABLE 19

| | | | SEQ |
|---|---|---|---|
| | Tar- | | ID |
| Name | get | Sequence | NO |
| R3132 | B2M | AUUGCUCCUUACGAGGAGACAGCAAGGACU | 2488 |
| | | GGUCUUU | |
| R4504_ | CIITA | AUUGCUCCUUACGAGGAGACGGGCUCUGAC | 1722 |
| CasPhi12_ | | AGGUAGG | |
| S | | | |
| R5406_ | CIITA | CUUUCAAGACUAAUAGAUUGCUCCUUACGA | 2222 |
| CasPhi12 | | GGAGACGGGUCAAUGCUAGGUACUGC | |

### Example 44

### Genome Editing with CasΦ Polypeptides Mediates Efficient Editing of CIITA Locus

[0512] This example demonstrates CasΦ-mediated genome editing of the CIITA locus. In this study, RNP complexes were formed using CasΦ polypeptides and gRNAs targeting CIITA (sequences shown in Tables D and O). K562 cells were nucleofected with RNP complexes (250 pmol) using Lonza nucleofection protocols. Cells were harvested after 48 hours, genomic DNA was isolated and the frequency of indel mutations was evaluated using NGS analysis (MiSeq, Illumina). As shown in FIG. 39, effective genome editing of the CIITA locus was achieved using CasΦ RNP complexes.

[0513] While preferred embodiments of the present invention have been shown and described herein, it will be apparent to those skilled in the art that such embodiments are provided by way of example only. Numerous variations, changes, and substitutions will now occur to those skilled in the art without departing from the invention. It should be understood that various alternatives to the embodiments of the invention described herein may be employed in practicing the invention. It is intended that the following claims define the scope of the invention and that methods and structures within the scope of these claims and their equivalents be covered thereby.

What is claimed is:

1. A composition comprising:
a) a programmable CasΦ nuclease or a nucleic acid encoding said programmable CasΦ nuclease, wherein said programmable CasΦ nuclease comprises at least 85% sequence identity to a sequence selected from the group consisting of SEQ ID NOs: 1 to 47, SEQ ID NO. 105, and SEQ ID NO. 107, and
b) a guide nucleic acid or a nucleic acid encoding said guide nucleic acid, wherein said guide nucleic acid comprises a region comprising a nucleotide sequence that is complementary to a target nucleic acid sequence and an additional region, wherein said region and said additional region are heterologous to each other.

2. The composition of claim 1, wherein the additional region of the guide nucleic acid comprises at least 85% sequence identity to a sequence selected from the group consisting of SEQ ID NOs: 48 to 86.

3. The composition of claim 1, wherein the guide nucleic acid comprises a sequence comprising at least 95% sequence identity to a sequence selected from the group consisting of SEQ ID NOs: 48 to 86.

4. The composition of claim 1, wherein the guide nucleic acid comprises a sequence selected from the group consisting of SEQ ID NOs: 48 to 86.

5. The composition of claim 1, wherein the programmable CasΦ nuclease comprises nickase activity.

6. The composition of claim 1, wherein the programmable CasΦ nuclease comprises double-strand cleavage activity.

7. The composition of claim 1, wherein the programmable CasΦ nuclease comprises at least 90% sequence identity to a sequence selected from the group consisting of SEQ ID NOs: 1 to 47, SEQ ID NO. 105, and SEQ ID NO. 107.

8. The composition of claim 1, wherein the programmable CasΦ nuclease comprises at least 95% sequence identity to a sequence selected from the group consisting of SEQ ID NOs: 1 to 47, SEQ ID NO. 105, and SEQ ID NO. 107.

9. The composition of claim 1, wherein the programmable CasΦ nuclease comprises at least 98% sequence identity to a sequence selected from the group consisting of SEQ ID NOs: 1 to 47, SEQ ID NO. 105, and SEQ ID NO. 107.

10. The composition of claim 1, wherein the programmable CasΦ nuclease comprises a sequence selected from the group consisting of SEQ ID NOs: 1 to 47, SEQ ID NO. 105, and SEQ ID NO. 107.

11. The composition of claim 1, wherein the guide nucleic acid does not comprise a tracrRNA.

12. The composition of claim 1, wherein the programmable CasΦ nuclease comprises greater nickase activity when complexed with the guide nucleic acid at a temperature from about 20° C. to about 25° C., as compared with complex formation at a temperature of about 37° C.

13. The composition of claim 1, wherein the additional region comprises at least 98% sequence identity to SEQ ID NO: 57.

14. The composition of claim 13, wherein the programmable CasΦ nuclease comprises greater nickase activity when complexed with the guide nucleic acid comprising a sequence comprising at least 98% sequence identity to SEQ ID NO: 57, as compared to when complexed with a guide nucleic acid comprising SEQ ID NO: 49.

15. The composition of claim 1, wherein the programmable CasΦ nuclease exhibits greater nicking activity as compared to double stranded cleavage activity.

16. The composition of claim 1, wherein the programmable CasΦ nuclease exhibits greater double stranded cleavage activity as compared to nicking activity.

17. The composition of any one of claims 1-16, wherein the programmable CasΦ nuclease comprises a single active site in a RuvC domain that is capable of catalyzing pre-crRNA processing and nicking or cleaving of nucleic acids.

18. The composition of any one of claims 1-17, wherein the programmable CasΦ nuclease recognizes a protospacer adjacent motif (PAM) of 5′-TBN-3′, wherein B is one or more of C, G, or T.

19. The composition of claim 18, wherein the programmable CasΦ nuclease recognizes a protospacer adjacent motif (PAM) of 5′-TTTN-3′.

20. A method of modifying a target nucleic acid sequence, the method comprising:
contacting a target nucleic acid sequence with a programmable CasΦ nuclease comprising at least 85% sequence identity to a sequence selected from the group consisting of SEQ ID NOs: 1 to 47, SEQ ID NO. 105, and SEQ ID NO. 107, and a guide nucleic acid,
wherein the programmable CasΦ nuclease cleaves the target nucleic acid sequence, thereby modifying the target nucleic acid sequence.

21. The method of claim 20, wherein the programmable CasΦ nuclease introduces a double-stranded break in the target nucleic acid sequence.

22. The method of claim 20, wherein the programmable CasΦ nuclease comprises double-strand cleavage activity.

23. The method of claim 20, wherein the programmable CasΦ nuclease cleaves a single-strand of the target nucleic acid sequence.

24. The method of claim 20, wherein the programmable CasΦ nuclease comprises nickase activity.

25. The method of claim 20, wherein the programmable CasΦ nuclease exhibits greater nicking activity as compared to double stranded cleavage activity.

26. The method of claim 20, wherein the programmable CasΦ nuclease exhibits greater double stranded cleavage activity as compared to nicking activity.

27. The method of claim 20, wherein the target nucleic acid is DNA.

28. The method of claim 20, wherein the target nucleic acid is double-stranded DNA.

29. The method of claim 20, wherein the programmable CasΦ nuclease cleaves a non-target strand of the double-stranded DNA, wherein the non-target strand is non-complementary to the guide nucleic acid.

30. The method of claim 20, wherein the programmable CasΦ nuclease does not cleave a target strand of the double-stranded DNA, wherein the target strand is complementary to the guide nucleic acid.

31. The method of claim 20, wherein the programmable CasΦ nuclease comprises at least 90% sequence identity to a sequence selected from the group consisting of SEQ ID NOs: 1 to 47, SEQ ID NO. 105, and SEQ ID NO. 107.

32. The method of claim 20, wherein the programmable CasΦ nuclease comprises at least 95% sequence identity to a sequence selected from the group consisting of SEQ ID NOs: 1 to 47, SEQ ID NO. 105, and SEQ ID NO. 107.

33. The method of claim 20, wherein the programmable CasΦ nuclease comprises at least 98% sequence identity to a sequence selected from the group consisting of SEQ ID NOs: 1 to 47, SEQ ID NO. 105 and SEQ ID NO. 107.

34. The method of claim 20, wherein the programmable CasΦ nuclease comprises a sequence selected from the group consisting of SEQ ID NOs: 1 to 47, SEQ ID NO. 105, and SEQ ID NO. 107.

35. The method of claim 20, wherein the guide nucleic acid comprises a sequence comprising at least 85% sequence identity to a sequence selected from the group consisting of SEQ ID NOs: 48 to 86.

36. The method of claim 20, wherein the guide nucleic acid comprises a sequence comprising at least 95% sequence identity to a sequence selected from the group consisting of SEQ ID NOs: 48 to 86.

37. The method of claim 20, wherein the guide nucleic acid comprises a sequence selected from the group consisting of SEQ ID NOs: 48 to 86.

38. The method of claim 20, wherein the guide nucleic acid does not comprise a tracrRNA.

39. The method of claim 20, wherein the target nucleic acid sequence comprises a mutated sequence or a sequence associated with a disease.

40. The method of claim 39, wherein the mutated sequence is removed after the programmable CasΦ nuclease cleaves the target nucleic acid sequence.

41. The method of claim 20, wherein the target nucleic acid sequence is in a human cell.

42. The method of claim 20, wherein the method is performed in vivo.

43. The method of claim 20, wherein the method is performed ex vivo.

44. The method of claim 20, further comprising inserting a donor polynucleotide into the target nucleic acid sequence at the site of cleavage.

45. A method of introducing a break in a target nucleic acid, the method comprising: contacting the target nucleic acid with:
(a) a first guide nucleic acid comprising a region that binds to a first programmable nickase comprising at least 85% sequence identity to a sequence selected from the group consisting of SEQ ID NOs: 1 to 47, SEQ ID NO. 105, and SEQ ID NO. 107; and
(b) a second guide nucleic acid comprising a region that binds to a second programmable nickase comprising at least 85% sequence identity to a sequence selected from the group consisting of SEQ ID NOs: 1 to 47, SEQ ID NO. 105, and SEQ ID NO. 107,
wherein the first guide nucleic acid comprises a first additional region that binds to the target nucleic acid and wherein the second guide nucleic acid comprises a second additional region that binds to the target nucleic acid and wherein the first additional region of the first guide nucleic acid and the second additional region of the second guide nucleic acid bind opposing strands of the target nucleic acid.

46. The method of claim 45, wherein the first programmable nickase, the second programmable nickase, or both comprise at least 90% sequence identity to a sequence selected from the group consisting of SEQ ID NOs: 1 to 47, SEQ ID NO. 105, SEQ ID NO. 107.

47. The method of claim 45, wherein the first programmable nickase, the second programmable nickase, or both comprise at least 95% sequence identity to a sequence selected from the group consisting of SEQ ID NOs: 1 to 47, SEQ ID NO. 105, SEQ ID NO. 107.

48. The method of claim 45, wherein the first programmable nickase, the second programmable nickase, or both comprise a sequence selected from the group consisting of SEQ ID NOs: 1 to 47, SEQ ID NO. 105, and SEQ ID NO. 107.

49. The method of claim 45, wherein the first guide nucleic acid, the second guide nucleic acid, or both comprise a sequence comprising at least 85% sequence identity to a sequence selected from the group consisting of SEQ ID NOs: 48 to 86.

50. The method of claim 45, wherein the first guide nucleic acid, the second guide nucleic acid, or both comprise a sequence comprising at least 95% sequence identity to a sequence selected from the group consisting of SEQ ID NOs: 48 to 86.

51. The method of claim 45, wherein the first guide nucleic acid, the second guide nucleic acid, or both comprise a sequence selected from the group consisting of SEQ ID NOs: 48 to 86.

52. The method of claim 45, wherein the first programmable nickase and the second programmable nickase exhibit greater nicking activity as compared to double stranded cleavage activity.

53. The method of claim 45, wherein the first programmable nickase and the second programmable nickase nick the target nucleic acid at two different sites.

54. The method of claim 45, wherein the target nucleic acid comprises double stranded DNA.

55. The method of claim 53, wherein the two different sites are on opposing strands of the double stranded DNA.

56. The method of claim 45, wherein the target nucleic acid comprises a mutated sequence or a sequence is associated with a disease.

57. The method of claim 56, wherein the mutated sequence is removed after the first programmable nickase and the second programmable nickase nick the target nucleic acid.

58. The method of claim 45, wherein the target nucleic acid is in a cell.

59. The method of claim 45, wherein the method is performed in vivo.

60. The method of claim 45, wherein the method is performed ex vivo.

61. The method of any one of claims 45-60, wherein the first programmable nickase and the second programmable nickase are the same.

62. The method of any one of claims 45-60, wherein the first programmable nickase and the second programmable nickase are different.

63. A method of detecting a target nucleic acid in a sample, the method comprising contacting a sample comprising a target nucleic acid with
(a) a programmable CasΦ nuclease comprising at least 85% sequence identity to a sequence selected from the group consisting of SEQ ID NOs: 1 to 47, SEQ ID NO. 105, and SEQ ID NO. 105;
(b) a guide RNA comprising a region that binds to the programmable CasΦ nuclease and an additional region that binds to the target nucleic acid; and
(c) a labeled single stranded DNA reporter that does not bind the guide RNA;
cleaving the labeled single stranded DNA reporter by the programmable CasΦ nuclease to release a detectable label; and
detecting the target nucleic acid by measuring a signal from the detectable label.

64. The method of claim 63, wherein the target nucleic acid is single stranded DNA.

65. The method of claim 63, wherein the target nucleic acid is double stranded DNA.

66. The method of claim 63, wherein the target nucleic acid is a viral nucleic acid.

67. The method of claim 63, wherein the target nucleic acid is bacterial nucleic acid.

68. The method of claim 63, wherein the target nucleic acid is from a human cell.

69. The method of claim 63, wherein the target nucleic acid is a fetal nucleic acid.

70. The method of claim 63, wherein the sample is derived from a subject's saliva, blood, serum, plasma, urine, aspirate, or biopsy sample.

71. The method of claim 63, wherein the programmable CasΦ nuclease comprises at least 95% sequence identity to a sequence selected from the group consisting of SEQ ID NOs: 1 to 47, SEQ ID NO. 105, SEQ ID NO. 107.

72. The method of claim 63, wherein the programmable CasΦ nuclease comprises a sequence selected from the group consisting of SEQ ID NOs: 1 to 47, SEQ ID NO. 105, and SEQ ID NO. 107.

73. The method of claim 63, wherein the guide RNA comprises at least about 95% sequence identity to a sequence selected from the group consisting of SEQ ID NOs: 48 to 86.

74. The method of claim 63, wherein the guide RNA comprises a sequence selected from the group consisting of SEQ ID NOs: 48 to 86.

75. The method of claim 63, wherein the sample comprises a phosphate buffer, a Tris buffer, or a HEPES buffer.

76. The method of claim 63, wherein the sample comprises a pH of 7 to 9.

77. The method of claim 63, wherein the sample comprises a pH of 7.5 to 8.

78. The method of claim 63, wherein the sample comprises a salt concentration of 25 nM to 200 mM.

79. The method of claim 63, wherein the single stranded DNA reporter comprises an ssDNA-fluorescence quenching DNA reporter.

80. The method of claim 63, wherein the ssDNA-fluorescence quenching DNA reporter is a universal ssDNA-fluorescence quenching DNA reporter.

81. The method of claim 63, wherein the programmable CasΦ nuclease exhibits PAM-independent cleaving.

82. A method of modulating transcription of a gene in a cell, the method comprising: introducing into a cell comprising a target nucleic acid sequence:
(i) a fusion polypeptide or a nucleic acid encoding the fusion polypeptide, wherein the fusion polypeptide comprises:
(a) a dCasΦ polypeptide comprising at least 85% sequence identity to a sequence selected from the group consisting of SEQ ID NOs: 1 to 47, SEQ ID NO. 105, and SEQ ID NO. 107, wherein the dCasΦ polypeptide is enzymatically inactive; and
(b) a polypeptide comprising transcriptional regulation activity; and
(ii) a guide nucleic acid, or a nucleic acid comprising a nucleotide sequence encoding the guide nucleic acid, wherein the guide nucleic acid comprises a region that binds to the dCasΦ polypeptide and an additional region that binds to the target nucleic acid;
wherein transcription of the gene is modulated through the fusion polypeptide acting on the target nucleic acid sequence.

83. The method of claim 82, wherein the dCasΦ polypeptide comprises at least 95% sequence identity to a sequence selected from the group consisting of SEQ ID NOs: 1 to 47, SEQ ID NO. 105, and SEQ ID NO. 107.

84. The method of claim 82, wherein the guide nucleic acid comprises at least about 95% sequence identity to a sequence selected from the group consisting of SEQ ID NOs: 48 to 86.

85. The method of claim 82, wherein the guide nucleic acid comprises a sequence selected from the group consisting of SEQ ID NOs: 48 to 86.

86. The method of claim 82, wherein the guide nucleic acid comprises a sequence selected from the group consisting of SEQ ID NOs: 48 to 86.

87. The method of claim 82, wherein the polypeptide comprising transcriptional regulation activity polypeptide comprises transcription activation activity.

88. The method of claim 82, wherein the polypeptide comprising transcriptional regulation activity polypeptide comprises transcription repressor activity.

89. The method of claim 82, wherein the polypeptide comprising transcriptional regulation activity polypeptide comprises an activity selected from the group consisting of transcription activation activity, transcription repression activity, nuclease activity, transcription release factor activity, histone modification activity, histone acetyltransferase activity, nucleic acid association activity, DNA methylase activity, direct or indirect DNA demethylase activity, methyltransferase activity, demethylase activity, acetyltransferase activity, deacetylase activity, kinase activity, phosphatase activity, ubiquitin ligase activity, deubiquitinating activity, adenylation activity, deadenylation activity, deaminase activity, SUMOylating activity, deSUMOylating activity, ribosylation activity, deribosylation activity, myristoylation activity, and demyristoylation activity.

90. A composition comprising:
a) a Cas nuclease or nucleic acid encoding said Cas nuclease, and
b) a guide nucleic acid or a nucleic acid encoding said guide nucleic acid, wherein said guide nucleic acid comprises a region comprising a nucleotide sequence that is complementary to a target nucleic acid sequence and an additional region, wherein said region and said additional region are heterologous to each other;
wherein the Cas nuclease comprises a RuvC domain, wherein the RuvC domain is capable of processing a pre-crRNA and cleaving the target nucleic acid.

91. The composition of claim 90, wherein the same active site in the RuvC domain catalyzes the processing of the pre-crRNA and the cleaving of the target nucleic acid.

92. The composition of claims 90 or 91, wherein the Cas nuclease is the programmable CasΦ nuclease of any one of claims 1-18.

93. The composition of any one of claims 90-92, wherein the Cas nuclease recognizes a protospacer adjacent motif (PAM) of 5′-TBN-3′, wherein B is one or more of C, G, or, T.

94. The composition of claim 93, wherein the Cas nuclease recognizes a protospacer adjacent motif (PAM) of 5′-TTTN-3′, optionally wherein the PAM is 5′-TTTN-3′.

95. The composition of claim 93, wherein the PAM is 5′-GTTK-3′, 5′-VTTK-3′, 5′-VTTS-3′, 5′-TTTS-3′ or 5′-VTTN-3′, where K is G or T, V is A, C or G, and S is C or G.

96. The composition of any one of claims 90-94, wherein the composition is used in a method of any one of claims 20-89.

97. The use of a programmable CasΦ nuclease to modify a target nucleic acid sequence according to the method of claims 20 to 44.

98. The use of a first programmable nickase and a second programmable nickase to introduce a break in a target nucleic acid according to the method of claims 45 to 62.

99. The use of a programmable CasΦ nuclease to detect a target nucleic acid in a sample according to the method of claims 63 to 81.

100. The use of a dCasΦ polypeptide to modulate transcription of a gene in a cell according to the method of claims 82 to 89.

101. The composition of any one of claims 1-19 or 45-100, wherein the region is a spacer region and the additional region is a repeat region.

102. The method, composition, or use of any one of claims 1-19 or 45-100, wherein the region is a repeat region and the additional region is a spacer region.

103. The method, composition, or use of claim 101 or 102, wherein the repeat region comprises a GAC sequence, optionally wherein the GAC sequence is at the 3′ end of the repeat region.

104. The method, composition, or use of claims 101-103, wherein the repeat region comprises a hairpin, optionally wherein the hairpin is in the 3′ portion of the repeat region.

105. The method, composition, or use of claim 104, wherein the hairpin comprises a double-stranded stem portion and a single-stranded loop portion.

106. The method, composition, or use of claim 105, wherein a strand of the stem portion comprises a CYC sequence and the other strand of the stem portion comprises a GRG sequence, wherein Y and R are complementary.

107. The method, composition, or use of claim 106, wherein the G of the GAC sequence is in the stem portion of the hairpin.

108. The method, composition, or use of any one of claims 105-107, wherein each strand of the stem portion comprises 3, 4 or 5 nucleotides.

109. The method, composition, or use of any one of claims 105-108, wherein the loop portion comprises between 2 and 8 nucleotides, optionally wherein the loop portion comprises 4 nucleotides.

110. The composition of claim 1, wherein the guide nucleic acid comprises at least 98% sequence identity to SEQ ID NO: 54.

111. The method, composition, or use according to any one of claims 101-110, wherein the repeat region is between 15 and 50 nucleotides in length, preferably, wherein the repeat region is between 19 and 37 nucleotides in length.

112. The method, composition, or use according to any one of claims 101-111, wherein the spacer region is between 15 and 50 nucleotides in length, between 15 and 40 nucleotides in length, or between 15 and 35 nucleotides in length, preferably wherein the spacer region is between 16 and 30 nucleotides in length.

113. The method, composition, or use according to claim 112, wherein the spacer region is between 16 and 20 nucleotides in length.

114. The composition according to any one of claims 1-19, 90-95, 101-113, wherein the programmable CasΦ nuclease forms a complex with a divalent metal ion, preferably wherein the divalent metal ion is Mg²⁺.

115. A programmable CasΦ nuclease or a nucleic acid encoding said programmable CasΦ nuclease, wherein said programmable CasΦ nuclease comprises at least 85% sequence identity to a sequence selected from the group consisting of SEQ ID NOs: 1 to 47, SEQ ID NO. 105, and SEQ ID NO. 107, and wherein
a) the programmable CasΦ nuclease is capable of binding to a guide RNA comprising a first region that is complementary to a target nucleic acid sequence in a eukaryotic genome and a second region that binds to the programmable CasΦ nuclease;
b) a complex comprising the programmable CasΦ nuclease and the guide RNA binds to the target sequence;
c) the programmable CasΦ nuclease comprises a RuvC domain, wherein the RuvC domain is capable of processing a pre-crRNA and cleaving the target nucleic acid; and
d) the programmable CasΦ nuclease does not require a tracrRNA to cleave the target nucleic acid.

116. A programmable CasΦ nuclease or a nucleic acid encoding said programmable CasΦ nuclease, wherein said programmable CasΦ nuclease comprises a RuvC-like domain which matches PFAM family PF07282 and does not match PFAM family PF18516, and wherein
a) the programmable CasΦ nuclease is capable of binding to a guide RNA comprising a first region that is complementary to a target nucleic acid sequence in a eukaryotic genome and a second region that binds to the programmable CasΦ nuclease;
b) a complex comprising the programmable CasΦ nuclease and the guide RNA binds to the target sequence;
c) the RuvC-like domain is capable of processing a pre-crRNA and cleaving the target nucleic acid; and
d) the programmable CasΦ nuclease does not require a tracrRNA to cleave the target nucleic acid.

117. A programmable CasΦ nuclease or a nucleic acid encoding said programmable CasΦ nuclease, wherein said programmable CasΦ nuclease comprises at least 85% sequence identity to a sequence selected from the group consisting of SEQ ID NOs: 1 to 47, SEQ ID NO. 105, or SEQ ID NO. 107, and wherein
a) the programmable CasΦ nuclease comprises a RuvC-like domain which matches PFAM family PF07282 and does not match PFAM family PF18516;
b) the programmable CasΦ nuclease is capable of binding to a guide RNA comprising a first region that is complementary to a target nucleic acid sequence in a eukaryotic genome and a second region that binds to the programmable CasΦ nuclease;
c) a complex comprising the programmable CasΦ nuclease and the guide RNA binds to the target sequence;
d) the RuvC-like domain is capable of processing a pre-crRNA and cleaving the target nucleic acid; and
e) the programmable CasΦ nuclease does not require a tracrRNA to cleave the target nucleic acid.

118. The programmable CasΦ nuclease or a nucleic acid of claims 115-117, wherein the same active site in the RuvC domain or RuvC-like domain catalyzes the processing of the pre-crRNA and the cleaving of the target nucleic acid.

119. The programmable CasΦ nuclease or a nucleic acid of claims 115-118, wherein the programmable CasΦ nuclease is fused or linked to one or more NLS.

120. The programmable CasΦ nuclease or a nucleic acid of claims 115-119, wherein:
a) the one or more NLS are fused or linked to the N-terminus of the programmable CasΦ nuclease;
b) the one or more NLS are fused or linked to the C-terminus of the programmable CasΦ nuclease; or
c) the one or more NLS are fused or linked to the N-terminus and the C-terminus of the programmable CasΦ nuclease.

121. A composition comprising the programmable CasΦ nuclease or a nucleic acid of claims 115-120 and a gRNA comprising a first region that is complementary to a target nucleic acid sequence in a eukaryotic genome and a second region that binds to the programmable CasΦ nuclease.

122. A composition comprising the programmable CasΦ nuclease or a nucleic acid of claims 115-120 and a cell, preferably wherein the cell is a eukaryotic cell.

123. A composition comprising the programmable CasΦ nuclease or a nucleic acid of claims 115-120 and a gRNA comprising a first region that is complementary to a target nucleic acid sequence in a eukaryotic genome and a second region that binds to the programmable CasΦ nuclease and a cell, preferably wherein the cell is a eukaryotic cell.

124. A eukaryotic cell comprising the programmable CasΦ nuclease or a nucleic acid of claims 115-120.

125. The eukaryotic cell of claim 124, wherein the cell further comprises a gRNA comprising a first region that is complementary to a target nucleic acid sequence in a eukaryotic genome and a second region that binds to the programmable CasΦ nuclease and a cell, preferably wherein the cell is a eukaryotic cell.

126. A vector comprising the nucleic acid of claims 115-120.

127. The vector of claim 126, wherein the vector is a viral vector.

128. The composition of claim 18, wherein the programmable CasΦ nuclease recognizes a protospacer adjacent motif (PAM) of 5′-TTN-3′.

129. The composition of any one of claims 1-17, wherein the programmable CasΦ nuclease recognizes a protospacer adjacent motif (PAM) of 5′-GTTB-3′, wherein B is C, G, or T.

130. The composition of claim 93, wherein the Cas nuclease recognizes a protospacer adjacent motif (PAM) of 5′-TTN-3′, optionally wherein the PAM is 5′-TTN-3′.

131. The composition of any one of claims 90-94, wherein the Cas nuclease recognizes a protospacer adjacent motif (PAM) of 5′-GTTK-3′, 5′-VTTK-3′, 5′-VTTS-3′, 5′-TTTS-3′ or 5′-VTTN-3′, where K is G or T, V is A, C or G, and S is C or G.

132. The composition of any one of claims 90-94, wherein the Cas nuclease recognizes a protospacer adjacent motif (PAM) of 5′-GTTB-3′, wherein B is C, G, or T.

133. A programmable CasΦ nuclease or a nucleic acid encoding said programmable CasΦ nuclease, wherein said programmable CasΦ nuclease comprises at least 85% sequence identity to a sequence selected from the group consisting of SEQ ID NOs: 1 to 47, SEQ ID NO. 105, and SEQ ID NO. 107, and wherein
a) the programmable CasΦ nuclease is capable of binding to a guide RNA comprising a first region that is complementary to a target nucleic acid sequence in a eukaryotic genome and a second region that binds to the programmable CasΦ nuclease;
b) a complex comprising the programmable CasΦ nuclease and the guide RNA binds to the target sequence;
c) the programmable CasΦ nuclease comprises a RuvC domain, wherein the RuvC domain is capable of processing a pre-crRNA and cleaving the target nucleic acid;
d) the programmable CasΦ nuclease cleaves both strands of the target nucleic acid comprising the target sequence, wherein the strand break is a staggered cut with a 5′ overhang; and
e) the programmable CasΦ nuclease does not require a tracrRNA to cleave the target nucleic acid.

134. A programmable CasΦ nuclease or a nucleic acid encoding said programmable CasΦ nuclease, wherein said programmable CasΦ nuclease comprises a RuvC-like domain which matches PFAM family PF07282 and does not match PFAM family PF18516, and wherein
a) the programmable CasΦ nuclease is capable of binding to a guide RNA comprising a first region that is complementary to a target nucleic acid sequence in a eukaryotic genome and a second region that binds to the programmable CasΦ nuclease;
b) a complex comprising the programmable CasΦ nuclease and the guide RNA binds to the target sequence;
c) the RuvC-like domain is capable of processing a pre-crRNA and cleaving the target nucleic acid;
d) the programmable CasΦ nuclease cleaves both strands of the target nucleic acid comprising the target sequence, wherein the strand break is a staggered cut with a 5′ overhang; and
e) the programmable CasΦ nuclease does not require a tracrRNA to cleave the target nucleic acid.

135. A programmable nuclease or a nucleic acid encoding said programmable nuclease, wherein said programmable nuclease is a Type V CRISPR/Cas enzyme nuclease and comprises between 400 and 900 amino acids, and wherein
a) the programmable CasΦ nuclease is capable of binding to a guide RNA comprising a first region that is complementary to a target nucleic acid sequence in a eukaryotic genome and a second region that binds to the programmable CasΦ nuclease;
b) a complex comprising the programmable CasΦ nuclease and the guide RNA binds to the target sequence;
c) the programmable CasΦ nuclease comprises a RuvC domain, wherein the RuvC domain is capable of processing a pre-crRNA and cleaving the target nucleic acid;
d) the programmable CasΦ nuclease cleaves both strands of the target nucleic acid comprising the target sequence, wherein the strand break is a staggered cut with a 5′ overhang; and
e) the programmable CasΦ nuclease does not require a tracrRNA to cleave the target nucleic acid.

136. A programmable CasΦ nuclease or a nucleic acid encoding said programmable CasΦ nuclease, wherein said programmable CasΦ nuclease comprises at least 85% sequence identity to a sequence selected from the group consisting of SEQ ID NOs: 1 to 47, SEQ ID NO. 105, and SEQ ID NO. 107, and wherein
a) the programmable CasΦ nuclease is capable of binding to a guide RNA comprising a first region that is complementary to a target nucleic acid sequence in a eukaryotic genome and a second region that binds to the programmable CasΦ nuclease;
b) a complex comprising the programmable CasΦ nuclease and the guide RNA binds to the target sequence;
c) the programmable CasΦ nuclease comprises a RuvC domain, wherein the RuvC domain is capable of processing a pre-crRNA and cleaving the target nucleic acid;
d) the programmable CasΦ nuclease is capable of cleaving the second region of the guide RNA in mammalian cells; and
e) the programmable CasΦ nuclease does not require a tracrRNA to cleave the target nucleic acid.

137. A programmable CasΦ nuclease or a nucleic acid encoding said programmable CasΦ nuclease, wherein said programmable CasΦ nuclease comprises a RuvC-like domain which matches PFAM family PF07282 and does not match PFAM family PF18516, and wherein
a) the programmable CasΦ nuclease is capable of binding to a guide RNA comprising a first region that is complementary to a target nucleic acid sequence in a eukaryotic genome and a second region that binds to the programmable CasΦ nuclease;
b) a complex comprising the programmable CasΦ nuclease and the guide RNA binds to the target sequence;
c) the RuvC-like domain is capable of processing a pre-crRNA and cleaving the target nucleic acid;
d) the programmable CasΦ nuclease is capable of cleaving the second region of the guide RNA in mammalian cells; and
e) the programmable CasΦ nuclease does not require a tracrRNA to cleave the target nucleic acid.

138. A programmable nuclease or a nucleic acid encoding said programmable nuclease, wherein said programmable nuclease is a Type V CRISPR/Cas enzyme nuclease and comprises between 400 and 900 amino acids, and wherein
a) the programmable CasΦ nuclease is capable of binding to a guide RNA comprising a first region that is complementary to a target nucleic acid sequence in a eukaryotic genome and a second region that binds to the programmable CasΦ nuclease;
b) a complex comprising the programmable CasΦ nuclease and the guide RNA binds to the target sequence;
c) the RuvC-like domain is capable of processing a pre-crRNA and cleaving the target nucleic acid;
d) the programmable CasΦ nuclease is capable of cleaving the second region of the guide RNA in mammalian cells; and
e) the programmable CasΦ nuclease does not require a tracrRNA to cleave the target nucleic acid.

139. A programmable CasΦ nuclease or a nucleic acid encoding said programmable CasΦ nuclease, wherein said programmable CasΦ nuclease comprises at least 85% sequence identity to a sequence selected from the group consisting of SEQ ID NOs: 1 to 47, SEQ ID NO. 105, and SEQ ID NO. 107, and wherein
a) the programmable CasΦ nuclease is capable of binding to a guide RNA comprising a first region that is complementary to a target nucleic acid sequence in a eukaryotic genome and a second region that binds to the programmable CasΦ nuclease;
b) a complex comprising the programmable CasΦ nuclease and the guide RNA binds to the target sequence;
c) the programmable CasΦ nuclease comprises a RuvC domain, wherein the RuvC domain is capable of processing a pre-crRNA and cleaving the target nucleic acid;
d) the programmable CasΦ nuclease cleaves both strands of a target nucleic acid comprising the target sequence, wherein the strand break is a staggered cut with a 5′ overhang;
e) the programmable CasΦ nuclease is capable of cleaving the second region of the guide RNA in mammalian cells; and
f) the programmable CasΦ nuclease does not require a tracrRNA to cleave the target nucleic acid.

140. A programmable CasΦ nuclease or a nucleic acid encoding said programmable CasΦ nuclease, wherein said programmable CasΦ nuclease comprises a RuvC-like domain which matches PFAM family PF07282 and does not match PFAM family PF18516, and wherein
a) the programmable CasΦ nuclease is capable of binding to a guide RNA comprising a first region that is complementary to a target nucleic acid sequence in a eukaryotic genome and a second region that binds to the programmable CasΦ nuclease;
b) a complex comprising the programmable CasΦ nuclease and the guide RNA binds to the target sequence;
c) the RuvC-like domain is capable of processing a pre-crRNA and cleaving the target nucleic acid;
d) the programmable CasΦ nuclease cleaves both strands of a target nucleic acid comprising the target sequence, wherein the strand break is a staggered cut with a 5′ overhang;
e) the programmable CasΦ nuclease is capable of cleaving the second region of the guide RNA in mammalian cells; and
f) the programmable CasΦ nuclease does not require a tracrRNA to cleave the target nucleic acid.

141. A programmable nuclease or a nucleic acid encoding said programmable nuclease, wherein said programmable nuclease is a Type V CRISPR/Cas enzyme nuclease and comprises between 400 and 900 amino acids, and wherein
a) the programmable CasΦ nuclease is capable of binding to a guide RNA comprising a first region that is complementary to a target nucleic acid sequence in a eukaryotic genome and a second region that binds to the programmable CasΦ nuclease;
b) a complex comprising the programmable CasΦ nuclease and the guide RNA binds to the target sequence;
c) the RuvC-like domain is capable of processing a pre-crRNA and cleaving the target nucleic acid;
d) the programmable CasΦ nuclease cleaves both strands of a target nucleic acid comprising the target sequence, wherein the strand break is a staggered cut with a 5′ overhang;
e) the programmable CasΦ nuclease is capable of cleaving the second region of the guide RNA in mammalian cells; and
f) the programmable CasΦ nuclease does not require a tracrRNA to cleave the target nucleic acid.

142. A programmable CasΦ nuclease or a nucleic acid encoding said programmable CasΦ nuclease, wherein said programmable CasΦ nuclease comprises at least 85% sequence identity to a sequence selected from the group consisting of SEQ ID NOs: 1 to 47, SEQ ID NO. 105, and SEQ ID NO. 107, and wherein
a) the programmable CasΦ nuclease is capable of binding to a guide RNA comprising a first region that is complementary to a target nucleic acid sequence in a eukaryotic genome and a second region that binds to the programmable CasΦ nuclease, wherein the first region comprises a seed region comprising between 10 and 16 nucleosides;
b) a complex comprising the programmable CasΦ nuclease and the guide RNA binds to the target sequence;
c) the programmable CasΦ nuclease comprises a RuvC domain, wherein the RuvC domain is capable of processing a pre-crRNA and cleaving the target nucleic acid; and
d) the programmable CasΦ nuclease does not require a tracrRNA to cleave the target nucleic acid.

143. A programmable CasΦ nuclease or a nucleic acid encoding said programmable CasΦ nuclease, wherein said programmable CasΦ nuclease comprises a RuvC-like domain which matches PFAM family PF07282 and does not match PFAM family PF18516, and wherein
a) the programmable CasΦ nuclease is capable of binding to a guide RNA comprising a first region that is complementary to a target nucleic acid sequence in a eukaryotic genome and a second region that binds to the programmable CasΦ nuclease, wherein the first region comprises a seed region comprising between 10 and 16 nucleosides;
b) a complex comprising the programmable CasΦ nuclease and the guide RNA binds to the target sequence;
c) the RuvC-like domain is capable of processing a pre-crRNA and cleaving the target nucleic acid; and
d) the programmable CasΦ nuclease does not require a tracrRNA to cleave the target nucleic acid.

144. A programmable nuclease or a nucleic acid encoding said programmable nuclease, wherein said programmable nuclease is a Type V CRISPR/Cas enzyme nuclease and comprises between 400 and 900 amino acids, and wherein
a) the programmable CasΦ nuclease is capable of binding to a guide RNA comprising a first region that is complementary to a target nucleic acid sequence in a eukaryotic genome and a second region that binds to the programmable CasΦ nuclease, wherein the first region comprises a seed region comprising between 10 and 16 nucleosides;
b) a complex comprising the programmable CasΦ nuclease and the guide RNA binds to the target sequence;
c) the RuvC-like domain is capable of processing a pre-crRNA and cleaving the target nucleic acid; and
d) the programmable CasΦ nuclease does not require a tracrRNA to cleave the target nucleic acid.

145. A programmable CasΦ nuclease or a nucleic acid encoding said programmable CasΦ nuclease, wherein said programmable CasΦ nuclease comprises at least 85% sequence identity to a sequence selected from the group consisting of SEQ ID NOs: 1 to 47, SEQ ID NO. 105, and SEQ ID NO. 107, and wherein
a) the programmable CasΦ nuclease is capable of binding to a guide RNA comprising a first region that is complementary to a target nucleic acid sequence in a eukaryotic genome and a second region that binds to the programmable CasΦ nuclease, wherein the first region comprises a seed region comprising between 10 and 16 nucleosides;
b) a complex comprising the programmable CasΦ nuclease and the guide RNA binds to the target sequence;
c) the programmable CasΦ nuclease comprises a RuvC domain, wherein the RuvC domain is capable of processing a pre-crRNA and cleaving the target nucleic acid;
d) the programmable CasΦ nuclease cleaves both strands of the target nucleic acid comprising the target sequence, wherein the strand break is a staggered cut with a 5′ overhang; and
e) the programmable CasΦ nuclease does not require a tracrRNA to cleave the target nucleic acid.

146. A programmable CasΦ nuclease or a nucleic acid encoding said programmable CasΦ nuclease, wherein said programmable CasΦ nuclease comprises a RuvC-like domain which matches PFAM family PF07282 and does not match PFAM family PF18516, and wherein
a) the programmable CasΦ nuclease is capable of binding to a guide RNA comprising a first region that is complementary to a target nucleic acid sequence in a eukaryotic genome and a second region that binds to the programmable CasΦ nuclease, wherein the first region comprises a seed region comprising between 10 and 16 nucleosides;
b) a complex comprising the programmable CasΦ nuclease and the guide RNA binds to the target sequence;
c) the RuvC-like domain is capable of processing a pre-crRNA and cleaving the target nucleic acid;
d) the programmable CasΦ nuclease cleaves both strands of the target nucleic acid comprising the target sequence, wherein the strand break is a staggered cut with a 5′ overhang; and
e) the programmable CasΦ nuclease does not require a tracrRNA to cleave the target nucleic acid.

147. A programmable nuclease or a nucleic acid encoding said programmable nuclease, wherein said programmable nuclease is a Type V CRISPR/Cas enzyme nuclease and comprises between 400 and 900 amino acids, and wherein
a) the programmable CasΦ nuclease is capable of binding to a guide RNA comprising a first region that is complementary to a target nucleic acid sequence in a eukaryotic genome and a second region that binds to the programmable CasΦ nuclease, wherein the first region comprises a seed region comprising between 10 and 16 nucleosides;
b) a complex comprising the programmable CasΦ nuclease and the guide RNA binds to the target sequence;
c) the RuvC-like domain is capable of processing a pre-crRNA and cleaving the target nucleic acid;
d) the programmable CasΦ nuclease cleaves both strands of the target nucleic acid comprising the target sequence, wherein the strand break is a staggered cut with a 5′ overhang; and
e) the programmable CasΦ nuclease does not require a tracrRNA to cleave the target nucleic acid.

148. A programmable CasΦ nuclease or a nucleic acid encoding said programmable CasΦ nuclease, wherein said programmable CasΦ nuclease comprises at least 85% sequence identity to a sequence selected from the group consisting of SEQ ID NOs: 1 to 47, SEQ ID NO. 105, and SEQ ID NO. 107, and wherein
a) the programmable CasΦ nuclease is capable of binding to a guide RNA comprising a first region that is complementary to a target nucleic acid sequence in a eukaryotic genome and a second region that binds to the programmable CasΦ nuclease, wherein the first region comprises a seed region comprising between 10 and 16 nucleosides;
b) a complex comprising the programmable CasΦ nuclease and the guide RNA binds to the target sequence;
c) the programmable CasΦ nuclease comprises a RuvC domain, wherein the RuvC domain is capable of processing a pre-crRNA and cleaving the target nucleic acid;
d) the programmable CasΦ nuclease is capable of cleaving the second region of the guide RNA in mammalian cells; and
e) the programmable CasΦ nuclease does not require a tracrRNA to cleave the target nucleic acid.

149. A programmable CasΦ nuclease or a nucleic acid encoding said programmable CasΦ nuclease, wherein said programmable CasΦ nuclease comprises a RuvC-like domain which matches PFAM family PF07282 and does not match PFAM family PF18516, and wherein
a) the programmable CasΦ nuclease is capable of binding to a guide RNA comprising a first region that is complementary to a target nucleic acid sequence in a eukaryotic genome and a second region that binds to the programmable CasΦ nuclease, wherein the first region comprises a seed region comprising between 10 and 16 nucleosides;
b) a complex comprising the programmable CasΦ nuclease and the guide RNA binds to the target sequence;
c) the RuvC-like domain is capable of processing a pre-crRNA and cleaving the target nucleic acid;
d) the programmable CasΦ nuclease is capable of cleaving the second region of the guide RNA in mammalian cells; and
e) the programmable CasΦ nuclease does not require a tracrRNA to cleave the target nucleic acid.

150. A programmable nuclease or a nucleic acid encoding said programmable nuclease, wherein said programmable nuclease is a Type V CRISPR/Cas enzyme nuclease and comprises between 400 and 900 amino acids, and wherein
a) the programmable CasΦ nuclease is capable of binding to a guide RNA comprising a first region that is complementary to a target nucleic acid sequence in a eukaryotic genome and a second region that binds to the programmable CasΦ nuclease, wherein the first region comprises a seed region comprising between 10 and 16 nucleosides;
b) a complex comprising the programmable CasΦ nuclease and the guide RNA binds to the target sequence;
c) the RuvC-like domain is capable of processing a pre-crRNA and cleaving the target nucleic acid;
d) the programmable CasΦ nuclease is capable of cleaving the second region of the guide RNA in mammalian cells; and
e) the programmable CasΦ nuclease does not require a tracrRNA to cleave the target nucleic acid.

151. A programmable CasΦ nuclease or a nucleic acid encoding said programmable CasΦ nuclease, wherein said programmable CasΦ nuclease comprises at least 85% sequence identity to a sequence selected from the group consisting of SEQ ID NOs: 1 to 47, SEQ ID NO. 105, and SEQ ID NO. 107, and wherein
a) the programmable CasΦ nuclease is capable of binding to a guide RNA comprising a first region that is complementary to a target nucleic acid sequence in a eukaryotic genome and a second region that binds to the programmable CasΦ nuclease, wherein the first region comprises a seed region comprising between 10 and 16 nucleosides;
b) a complex comprising the programmable CasΦ nuclease and the guide RNA binds to the target sequence;
c) the programmable CasΦ nuclease comprises a RuvC domain, wherein the RuvC domain is capable of processing a pre-crRNA and cleaving the target nucleic acid;
d) the programmable CasΦ nuclease cleaves both strands of a target nucleic acid comprising the target sequence, wherein the strand break is a staggered cut with a 5′ overhang;
e) the programmable CasΦ nuclease is capable of cleaving the second region of the guide RNA in mammalian cells; and
f) the programmable CasΦ nuclease does not require a tracrRNA to cleave the target nucleic acid.

152. A programmable CasΦ nuclease or a nucleic acid encoding said programmable CasΦ nuclease, wherein said programmable CasΦ nuclease comprises a RuvC-like domain which matches PFAM family PF07282 and does not match PFAM family PF18516, and wherein
a) the programmable CasΦ nuclease is capable of binding to a guide RNA comprising a first region that is complementary to a target nucleic acid sequence in a eukaryotic genome and a second region that binds to the programmable CasΦ nuclease, wherein the first region comprises a seed region comprising between 10 and 16 nucleosides;
b) a complex comprising the programmable CasΦ nuclease and the guide RNA binds to the target sequence;
c) the RuvC-like domain is capable of processing a pre-crRNA and cleaving the target nucleic acid;
d) the programmable CasΦ nuclease cleaves both strands of a target nucleic acid comprising the target sequence, wherein the strand break is a staggered cut with a 5′ overhang;
e) the programmable CasΦ nuclease is capable of cleaving the second region of the guide RNA in mammalian cells; and
f) the programmable CasΦ nuclease does not require a tracrRNA to cleave the target nucleic acid.

153. A programmable nuclease or a nucleic acid encoding said programmable nuclease, wherein said programmable nuclease is a Type V CRISPR/Cas enzyme nuclease and comprises between 400 and 900 amino acids, and wherein
a) the programmable CasΦ nuclease is capable of binding to a guide RNA comprising a first region that is complementary to a target nucleic acid sequence in a eukaryotic genome and a second region that binds to the programmable CasΦ nuclease, wherein the first region comprises a seed region comprising between 10 and 16 nucleosides;
b) a complex comprising the programmable CasΦ nuclease and the guide RNA binds to the target sequence;
c) the RuvC-like domain is capable of processing a pre-crRNA and cleaving the target nucleic acid;
d) the programmable CasΦ nuclease cleaves both strands of a target nucleic acid comprising the target sequence, wherein the strand break is a staggered cut with a 5′ overhang;
e) the programmable CasΦ nuclease is capable of cleaving the second region of the guide RNA in mammalian cells; and
f) the programmable CasΦ nuclease does not require a tracrRNA to cleave the target nucleic acid.

154. The programmable CasΦ nuclease or a nucleic acid of any of claims 133-153, wherein the same active site in the RuvC domain or RuvC-like domain catalyzes the processing of the pre-crRNA and the cleaving of the target nucleic acid.

155. The programmable CasΦ nuclease or a nucleic acid of any of claims 133-154, wherein the programmable CasΦ nuclease is fused or linked to one or more NLS.

156. The programmable CasΦ nuclease or a nucleic acid of any of claims 133-155, wherein:
a) the one or more NLS are fused or linked to the N-terminus of the programmable CasΦ nuclease;
b) the one or more NLS are fused or linked to the C-terminus of the programmable CasΦ nuclease; or
c) the one or more NLS are fused or linked to the N-terminus and the C-terminus of the programmable CasΦ nuclease.

157. A composition comprising the programmable CasΦ nuclease or a nucleic acid of any of claims 133-156 and a gRNA comprising a first region that is complementary to a target nucleic acid sequence in a eukaryotic genome and a second region that binds to the programmable CasΦ nuclease.

158. The composition of claim 157, wherein the first region comprises a seed region comprising between 10 and 16 nucleosides.

159. The composition of claim 158, wherein the seed region comprises 16 nucleosides.

160. A composition comprising the programmable CasΦ nuclease or a nucleic acid of claims 133-156 and a cell, preferably wherein the cell is a eukaryotic cell.

161. A composition comprising the programmable CasΦ nuclease or a nucleic acid of any of claims 133-156 and a gRNA comprising a first region that is complementary to a target nucleic acid sequence in a eukaryotic genome and a second region that binds to the programmable CasΦ nuclease and a cell, preferably wherein the cell is a eukaryotic cell.

162. The composition of claim 161, wherein the first region comprises a seed region comprising between 10 and 16 nucleosides.

163. The composition of claim 162, wherein the seed region comprises 16 nucleosides.

164. A eukaryotic cell comprising the programmable CasΦ nuclease or a nucleic acid of any of claims 133-156.

165. The eukaryotic cell of claim 164, wherein the cell further comprises a gRNA comprising a first region that is complementary to a target nucleic acid sequence in a eukaryotic genome and a second region that binds to the programmable CasΦ nuclease.

166. The eukaryotic cell of claim 165, wherein the first region comprises a seed region comprising between 10 and 16 nucleosides.

167. The eukaryotic cell of claim 166, wherein the seed region comprises 16 nucleosides.

168. A vector comprising the nucleic acid of any of claims 133-156.

169. The vector of claim 168, wherein the vector is a viral vector.

170. A guide nucleic acid, or a nucleic acid encoding said guide nucleic acid, comprising a sequence that is the same as or differs by no more than 5, 4, 3, 2, or 1 nucleotides from:
a) a sequence from Tables A to AH; or
b) a sequence comprising a repeat sequence from Table 2 and a spacer sequence from Tables A to H.

171. The guide nucleic acid of claim 170 comprising:
a) a sequence from Tables A to AH; or
b) a sequence comprising a repeat sequence from Table 2 and a spacer sequence from Tables A to H.

172. The guide nucleic acid of claim 170 or claim 171, wherein the guide nucleic acid comprises RNA and/or DNA.

173. The guide nucleic acid of claim 172, wherein the guide nucleic acid is a guide RNA.

174. A complex comprising the guide nucleic acid of any of claims 171 to 173 and a programmable CasΦ nuclease.

175. A eukaryotic cell comprising the guide nucleic acid of any of claims 165 to 167.

176. The eukaryotic cell of claim 175 further comprising a programmable CasΦ nuclease.

177. A vector encoding the guide nucleic acid of any of claims 170 to 173.

178. The vector of claim 177, wherein the vector is a viral vector.

179. A method of introducing a first modification in a first gene and a second modification in a second gene, the method comprising contacting a cell with a CasΦ nuclease; a first guide RNA that is at least partially complementary to an equal length portion of the first gene; and a second guide RNA that is at least partially complementary to an equal length portion of the second gene.

180. The method of claim 179, wherein the CasΦ nuclease is a CasΦ12 nuclease.

181. The method of claim 180, wherein the CasΦ12 nuclease comprises or consists of an amino acid sequence of SEQ ID NO: 12.

182. The method of any one of claims 179-181, wherein the first and/or second modification comprises an insertion of a nucleotide, a deletion of a nucleotide or a combination thereof.

183. The method of any one of claims 179-181, wherein the first and/or second modification comprises an epigenetic modification.

184. The method of any one of claims 179-183, wherein the first and/or second mutation results in a reduction in the expression of the first gene and/or second gene, respectively.

185. The method of any one of claims 179-184, wherein the reduction in the expression is at least about a 10% reduction, at least about a 20% reduction, at least about a 30% reduction, at least about a 40% reduction, at least about a 50% reduction, at least about a 60% reduction, at least about a 70% reduction, at least about an 80% reduction, or at least about a 90% reduction.

186. The method of any one of claims 179-185, comprising contacting the cell with three different guide RNAs targeting three different genes.

187. A programmable CasΦ nuclease or a nucleic acid encoding said programmable CasΦ nuclease, wherein said programmable CasΦ nuclease comprises at least 85% sequence identity to SEQ ID NO: 12.

188. The programmable CasΦ nuclease or a nucleic acid of claim 187, wherein said programmable CasΦ nuclease comprises at least 90% sequence identity to SEQ ID NO: 12.

189. The programmable CasΦ nuclease or a nucleic acid of claim 187, wherein said programmable CasΦ nuclease comprises at least 95% sequence identity to SEQ ID NO: 12.

190. The programmable CasΦ nuclease or a nucleic acid of claim 187, wherein said programmable CasΦ nuclease comprises at least 98% sequence identity to SEQ ID NO: 12.

191. The programmable CasΦ nuclease or a nucleic acid of claim 187, wherein said programmable CasΦ nuclease comprises or consists of an amino acid sequence of SEQ ID NO: 12.

192. A programmable CasΦ nuclease or a nucleic acid encoding said programmable CasΦ nuclease, wherein said programmable CasΦ nuclease comprises at least 85% sequence identity to SEQ ID NO: 18.

193. The programmable CasΦ nuclease or a nucleic acid of claim 192, wherein said programmable CasΦ nuclease comprises at least 90% sequence identity to SEQ ID NO: 18.

194. The programmable CasΦ nuclease or a nucleic acid of claim 192, wherein said programmable CasΦ nuclease comprises at least 95% sequence identity to SEQ ID NO: 18.

195. The programmable CasΦ nuclease or a nucleic acid of claim 192, wherein said programmable CasΦ nuclease comprises at least 98% sequence identity to SEQ ID NO: 18.

196. The programmable CasΦ nuclease or a nucleic acid of claim 192, wherein said programmable CasΦ nuclease comprises or consists of an amino acid sequence of SEQ ID NO: 18.

197. A programmable CasΦ nuclease or a nucleic acid encoding said programmable CasΦ nuclease, wherein said programmable CasΦ nuclease comprises at least 85% sequence identity to SEQ ID NO: 32.

198. The programmable CasΦ nuclease or a nucleic acid of claim 197, wherein said programmable CasΦ nuclease comprises at least 85% sequence identity to SEQ ID NO: 32.

199. The programmable CasΦ nuclease or a nucleic acid of claim 197, wherein said programmable CasΦ nuclease comprises at least 90% sequence identity to SEQ ID NO: 32.

200. The programmable CasΦ nuclease or a nucleic acid of claim 197, wherein said programmable CasΦ nuclease comprises at least 95% sequence identity to SEQ ID NO: 32.

201. The programmable CasΦ nuclease or a nucleic acid of claim 197, wherein said programmable CasΦ nuclease comprises at least 98% sequence identity to SEQ ID NO: 32.

202. The programmable CasΦ nuclease or a nucleic acid of claim 197, wherein said programmable CasΦ nuclease comprises or consists of an amino acid sequence of SEQ ID NO: 32.

203. The programmable CasΦ nuclease or a nucleic acid of any one of claims 187 to 202, wherein the programmable CasΦ nuclease is capable of binding to a guide RNA comprising a first region that is complementary to a target nucleic acid sequence in a eukaryotic genome and a second region that binds to the programmable CasΦ nuclease.

204. The programmable CasΦ nuclease or a nucleic acid of claim 203, wherein a complex comprising the programmable CasΦ nuclease and the guide RNA binds to the target sequence.

205. The programmable CasΦ nuclease or a nucleic acid of any one of claims 187 to 204, wherein the programmable CasΦ nuclease does not require a tracrRNA to cleave a target nucleic acid.

206. The programmable CasΦ nuclease or a nucleic acid of any one of claims 187 to 205, wherein the programmable CasΦ nuclease wherein the programmable CasΦ nuclease comprises a RuvC domain, wherein the RuvC domain is capable of processing a pre-crRNA and cleaving a target nucleic acid.

207. A composition comprising the programmable CasΦ nuclease or a nucleic acid of any of claims 187-206 and a guide nucleic acid comprising a first region that is complementary to a target nucleic acid sequence in a eukaryotic genome and a second region that binds to the programmable CasΦ nuclease.

208. The composition of claim 207, wherein the first region comprises a seed region comprising between 10 and 16 nucleosides.

209. The composition of claim 209, wherein the seed region comprises 16 nucleosides.

210. A composition comprising the programmable CasΦ nuclease or a nucleic acid of claims 187-206 and a cell, preferably wherein the cell is a eukaryotic cell.

211. A composition comprising the programmable CasΦ nuclease or a nucleic acid of any of claims 187-206 and a guide nucleic acid comprising a first region that is complementary to a target nucleic acid sequence in a eukaryotic genome and a second region that binds to the programmable CasΦ nuclease and a cell, preferably wherein the cell is a eukaryotic cell.

212. The composition of claim 211, wherein the first region comprises a seed region comprising between 10 and 16 nucleosides.

213. The composition of claim 212, wherein the seed region comprises 16 nucleosides.

214. A eukaryotic cell comprising the programmable CasΦ nuclease or a nucleic acid of any of claims 187-206.

215. The eukaryotic cell of claim 214, wherein the cell further comprises a guide nucleic acid comprising a first region that is complementary to a target nucleic acid sequence in a eukaryotic genome and a second region that binds to the programmable CasΦ nuclease.

216. The eukaryotic cell of claim 215, wherein the first region comprises a seed region comprising between 10 and 16 nucleosides.

217. The eukaryotic cell of claim 217, wherein the seed region comprises 16 nucleosides.

218. A vector comprising the nucleic acid of any of claims 187-206.

219. The vector of claim 218, wherein the vector is a viral vector.

220. The vector of claim 168 or claim 218, wherein the vector further comprises a nucleic acid encoding a guide nucleic acid, wherein the guide nucleic acid comprises a first region that is complementary to a target nucleic acid sequence in a eukaryotic genome and a second region that binds to the programmable CasΦ nuclease.

221. The vector of claim 220, wherein the guide nucleic acid is a guide RNA.

222. The vector of any one of claims 168, 219-221, wherein the further comprises a donor polynucleotide.

223. The composition of claim 207 or claim 211 or the eukaryotic cell of claim 215, wherein the guide nucleic acid is a guide RNA.

224. A programmable nuclease or a nucleic acid encoding said programmable nuclease, wherein said programmable nuclease is a Type V CRISPR/Cas enzyme nuclease and comprises between 400 and 900 amino acids, and wherein
a) the programmable nuclease is capable of binding to a guide RNA comprising a first region that is complementary to a target nucleic acid sequence in a eukaryotic genome and a second region that binds to the programmable nuclease;
b) a complex comprising the programmable nuclease and the guide RNA binds to the target sequence;
c) the programmable nuclease comprises a RuvC domain, wherein the RuvC domain is capable of processing a pre-crRNA and cleaving the target nucleic acid;
d) the programmable nuclease cleaves both strands of the target nucleic acid comprising the target sequence, wherein the strand break is a staggered cut with a 5′ overhang; and
e) the programmable nuclease does not require a tracrRNA to cleave the target nucleic acid.

225. A programmable nuclease or a nucleic acid encoding said programmable nuclease, wherein said programmable nuclease is a Type V CRISPR/Cas enzyme nuclease and comprises between 400 and 900 amino acids, and wherein
a) the programmable nuclease is capable of binding to a guide RNA comprising a first region that is complementary to a target nucleic acid sequence in a eukaryotic genome and a second region that binds to the programmable nuclease;
b) a complex comprising the programmable nuclease and the guide RNA binds to the target sequence;
c) the RuvC-like domain is capable of processing a pre-crRNA and cleaving the target nucleic acid;
d) the programmable nuclease is capable of cleaving the second region of the guide RNA in mammalian cells; and
e) the programmable nuclease does not require a tracrRNA to cleave the target nucleic acid.

226. A programmable nuclease or a nucleic acid encoding said programmable nuclease, wherein said programmable nuclease is a Type V CRISPR/Cas enzyme nuclease and comprises between 400 and 900 amino acids, and wherein
a) the programmable nuclease is capable of binding to a guide RNA comprising a first region that is complementary to a target nucleic acid sequence in a eukaryotic genome and a second region that binds to the programmable nuclease;
b) a complex comprising the programmable nuclease and the guide RNA binds to the target sequence;
c) the RuvC-like domain is capable of processing a pre-crRNA and cleaving the target nucleic acid;
d) the programmable nuclease cleaves both strands of a target nucleic acid comprising the target sequence, wherein the strand break is a staggered cut with a 5′ overhang;
e) the programmable nuclease is capable of cleaving the second region of the guide RNA in mammalian cells; and
f) the programmable nuclease does not require a tracrRNA to cleave the target nucleic acid.

227. A programmable nuclease or a nucleic acid encoding said programmable nuclease, wherein said programmable nuclease is a Type V CRISPR/Cas enzyme nuclease and comprises between 400 and 900 amino acids, and wherein
a) the programmable nuclease is capable of binding to a guide RNA comprising a first region that is complementary to a target nucleic acid sequence in a eukaryotic genome and a second region that binds to the programmable nuclease, wherein the first region comprises a seed region comprising between 10 and 16 nucleosides;
b) a complex comprising the programmable nuclease and the guide RNA binds to the target sequence;
c) the RuvC-like domain is capable of processing a pre-crRNA and cleaving the target nucleic acid; and
d) the programmable nuclease does not require a tracrRNA to cleave the target nucleic acid.

228. A programmable nuclease or a nucleic acid encoding said programmable nuclease, wherein said programmable nuclease is a Type V CRISPR/Cas enzyme nuclease and comprises between 400 and 900 amino acids, and wherein
a) the programmable nuclease is capable of binding to a guide RNA comprising a first region that is complementary to a target nucleic acid sequence in a eukaryotic genome and a second region that binds to the programmable nuclease, wherein the first region comprises a seed region comprising between 10 and 16 nucleosides;
b) a complex comprising the programmable nuclease and the guide RNA binds to the target sequence;
c) the RuvC-like domain is capable of processing a pre-crRNA and cleaving the target nucleic acid;
d) the programmable nuclease cleaves both strands of the target nucleic acid comprising the target sequence, wherein the strand break is a staggered cut with a 5′ overhang; and
e) the programmable nuclease does not require a tracrRNA to cleave the target nucleic acid.

229. A programmable nuclease or a nucleic acid encoding said programmable nuclease, wherein said programmable nuclease is a Type V CRISPR/Cas enzyme nuclease and comprises between 400 and 900 amino acids, and wherein
a) the programmable nuclease is capable of binding to a guide RNA comprising a first region that is complementary to a target nucleic acid sequence in a eukaryotic genome and a second region that binds to the programmable nuclease, wherein the first region comprises a seed region comprising between 10 and 16 nucleosides;
b) a complex comprising the programmable nuclease and the guide RNA binds to the target sequence;
c) the RuvC-like domain is capable of processing a pre-crRNA and cleaving the target nucleic acid;
d) the programmable nuclease is capable of cleaving the second region of the guide RNA in mammalian cells; and
e) the programmable nuclease does not require a tracrRNA to cleave the target nucleic acid.

230. A programmable nuclease or a nucleic acid encoding said programmable nuclease, wherein said programmable nuclease is a Type V CRISPR/Cas enzyme nuclease and comprises between 400 and 900 amino acids, and wherein
a) the programmable nuclease is capable of binding to a guide RNA comprising a first region that is complementary to a target nucleic acid sequence in a eukaryotic genome and a second region that binds to the programmable nuclease, wherein the first region comprises a seed region comprising between 10 and 16 nucleosides;
b) a complex comprising the programmable nuclease and the guide RNA binds to the target sequence;
c) the RuvC-like domain is capable of processing a pre-crRNA and cleaving the target nucleic acid;
d) the programmable nuclease cleaves both strands of a target nucleic acid comprising the target sequence, wherein the strand break is a staggered cut with a 5′ overhang;
e) the programmable nuclease is capable of cleaving the second region of the guide RNA in mammalian cells; and
f) the programmable nuclease does not require a tracrRNA to cleave the target nucleic acid.

231. The programmable nuclease or a nucleic acid of any of claims 224-230, wherein the same active site in the RuvC domain or RuvC-like domain catalyzes the processing of the pre-crRNA and the cleaving of the target nucleic acid.

232. The programmable nuclease or a nucleic acid of any of claims 224-231, wherein the programmable nuclease is fused or linked to one or more NLS.

233. The programmable nuclease or a nucleic acid of claim 232, wherein:
a) the one or more NLS are fused or linked to the N-terminus of the programmable nuclease;
b) the one or more NLS are fused or linked to the C-terminus of the programmable nuclease; or
c) the one or more NLS are fused or linked to the N-terminus and the C-terminus of the programmable nuclease.

234. A composition comprising the programmable nuclease or a nucleic acid of any of claims 224-233 and a gRNA comprising a first region that is complementary to a target nucleic acid sequence in a eukaryotic genome and a second region that binds to the programmable nuclease.

235. The composition of claim 234, wherein the first region comprises a seed region comprising between 10 and 16 nucleosides.

236. The composition of claim 235, wherein the seed region comprises 16 nucleosides.

237. A composition comprising the programmable nuclease or a nucleic acid of claims 224-233 and a cell, preferably wherein the cell is a eukaryotic cell.

238. A composition comprising the programmable nuclease or a nucleic acid of any of claims 224-233 and a gRNA comprising a first region that is complementary to a target nucleic acid sequence in a eukaryotic genome and a second region that binds to the programmable nuclease and a cell, preferably wherein the cell is a eukaryotic cell.

239. The composition of claim 238, wherein the first region comprises a seed region comprising between 10 and 16 nucleosides.

240. The composition of claim 239, wherein the seed region comprises 16 nucleosides.

241. A eukaryotic cell comprising the programmable nuclease or a nucleic acid of any of claims 224-233.

242. The eukaryotic cell of claim 241, wherein the cell further comprises a gRNA comprising a first region that is complementary to a target nucleic acid sequence in a eukaryotic genome and a second region that binds to the programmable nuclease.

243. The eukaryotic cell of claim 242, wherein the first region comprises a seed region comprising between 10 and 16 nucleosides.

244. The eukaryotic cell of claim 243, wherein the seed region comprises 16 nucleosides.

245. A vector comprising the nucleic acid of any of claims 224-233.

246. The vector of claim 245, wherein the vector is a viral vector.

247. A complex comprising a first programmable CasΦ nuclease and a second programmable CasΦ nuclease.

248. The complex of claim 224, wherein the first programmable CasΦ nuclease and the second programmable CasΦ nuclease are the same programmable CasΦ nuclease.

249. A dimer comprising a first programmable CasΦ nuclease and a second programmable CasΦ nuclease.

250. A homodimer comprising a first programmable CasΦ nuclease and a second programmable CasΦ nuclease.

251. A method of modifying a cell comprising a target nucleic acid, comprising introducing the composition of any one of claims 1-19, 90-95, 157-159, 207-209, 234-236 to the cell, wherein the programmable CasΦ nuclease, programmable nuclease or the cas nuclease cleaves the target nucleic acid, thereby modifying the cell.

252. A method of modifying a cell comprising a target nucleic acid, comprising introducing to the cell (i) the programmable CasΦ nuclease or programmable nuclease of any one of claims 115-120, 133-156, 187-206, or 224-233 and (ii) a guide nucleic acid, wherein the programmable CasΦ nuclease or programmable Cas nuclease cleaves the target nucleic acid, thereby modifying the cell.

253. The method of claim 252, wherein the guide nucleic acid is a guide RNA.

254. The method of any one of claims 251-253, wherein the method further comprises introducing a donor polynucleotide to the cell.

255. The method of claim 254, wherein the method comprises inserting the donor polynucleotide into the target nucleic acid at the site of cleavage.

256. The method of any one of claims 251-255, wherein the cell is a eukaryotic cell, preferably a human cell.

257. The method of claim 256, wherein the cell is a T cell.

258. The method of claim 257, wherein the T cell is a CAR-T cell.

259. The method of claim 256, wherein the cell is a stem cell.

260. The method of claim 259, wherein the cell is a hematopoietic stem cell.

261. The method of claim 259, wherein the stem cell is a pluripotent stem cell, preferably an induced pluripotent stem cell.

262. A modified cell obtained or obtainable by the method of any one of claims 251-261.

263. A modified human cell obtained or obtainable by the method of claim 41.

264. A modified cell obtained or obtainable by the method of claim 58.

265. The modified cell of claim 264, wherein the cell is a eukaryotic cell, preferably a human cell.

266. The modified cell of any one of claims 263-265, wherein the cell is a T cell.

267. The modified cell of claim 266, wherein the T cell is a CAR-T cell.

268. The modified cell of any one of claims 263-265, wherein the cell is a stem cell.

269. The modified cell of claim 268, wherein the cell is a hematopoietic stem cell.

270. The modified cell of claim 268, wherein the cell is a pluripotent stem cell, preferably an induced pluripotent stem cell.

271. The use of a CasΦ nuclease to introduce a first modification in a first gene and a second modification in a gene according to the method of any one of claims 179 to 186.

272. The use of a programmable CasΦ nuclease, programmable nuclease or a cas nuclease to modify a cell according to the method of any one of claims 251 to 261.

273. The method of claim 251 or claim 252, wherein the introducing comprises lipid nanoparticle delivery of nucleic acid encoding the programmable CasΦ nuclease, programmable nuclease or cas nuclease and the guide nucleic acid.

274. The method of claim 273, wherein the nucleic acid further comprises a donor polynucleotide.

275. The method of claim 273 or claim 274, wherein the nucleic acid is a viral vector.

276. The method of claim 275, wherein the viral vector is an AAV vector.

The application's sequence listing, which the Patent Office published only in electronic form, follows.

SEQUENCE LISTING (2490 sequences)

SEQ ID NO: 1 - protein, 707 aa, Unknown
  Description of Unknown: CasPhi sequence
MADTPTLFTQFLRHHLPGQRFRKDILKQAGRILANKGEDATIAFLRGKSEESPPDFQPPVKCPIIACSRPLTEWPIYQASVAIQGYVYGQSLAEFEASDPGCSKDGLLGWFDKTGVCTDYFSVQGLNLIFQNARKRYIGVQTKVTNRNEKRHKKLKRINAKRIAEGLPELTSDEPESALDETGHLIDPPGLNTNIYCYQQVSPKPLALSEVNQLPTAYAGYSTSGDDPIQPMVTKDRLSISKGQPGYIPEHQRALLSQKKHRRMRGYGLKARALLVIVRIQDDWAVIDLRSLLRNAYWRRIVQTKEPSTITKLLKLVTGDPVLDATRMVATFTYKPGIVQVRSAKCLKNKQGSKLFSERYLNETVSVTSIDLGSNNLVAVATYRLVNGNTPELLQRFTLPSHLVKDFERYKQAHDTLEDSIQKTAVASLPQGQQTEIRMWSMYGFREAQERVCQELGLADGSIPWNVMTATSTILTDLFLARGGDPKKCMFTSEPKKKKNSKQVLYKIRDRAWAKMYRTLLSKETREAWNKALWGLKRGSPDYARLSKRKEELARRCVNYTISTAEKRAQCGRTIVALEDLNIGFFHGRGKQEPGWVGLFTRKKENRWLMQALHKAFLELAHHRGYHVIEVNPAYTSQTCPVCRHCDPDNRDQHNREAFHCIGCGFRGNADLDVATHNIAMVAITGESLKRARGSVASKTPQPLAAE

SEQ ID NO: 2 - protein, 757 aa, Unknown
  Description of Unknown: CasPhi sequence
MPKPAVESEFSKVLKKHFPGERFRSSYMKRGGKILAAQGEEAVVAYLQGKSEEEPPNFQPPAKCHVVTKSRDFAEWPIMKASEAIQRYIYALSTTERAACKPGKSSESHAAWFAATGVSNHGYSHVQGLNLIFDHTLGRYDGVLKKVQLRNEKARARLESINASRADEGLPEIKAEEEEVATNETGHLLQPPGINPSFYVYQTISPQAYRPRDEIVLPPEYAGYVRDPNAPIPLGVVRNRCDIQKGCPGYIPEWQREAGTAISPKTGKAVTVPGLSPKKNKRMRRYWRSEKEKAQDALLVTVRIGTDWVVIDVRGLLRNARWRTIAPKDISLNALLDLFTGDPVIDVRRNIVTFTYTLDACGTYARKWTLKGKQTKATLDKLTATQTVALVAIDLGQTNPISAGISRVTQENGALQCEPLDRFTLPDDLLKDISAYRIAWDRNEEELRARSVEALPEAQQAEVRALDGVSKETARTQLCADFGLDPKRLPWDKMSSNTTFISEALLSNSVSRDQVFFTPAPKKGAKKKAPVEVMRKDRTWARAYKPRLSVEAQKLKNEALWALKRTSPEYLKLSRRKEELCRRSINYVIEKTRRRTQCQIVIPVIEDLNVRFFHGSGKRLPGWDNFFTAKKENRWFIQGLHKAFSDLRTHRSFYVFEVRPERTSITCPKCGHCEVGNRDGEAFQCLSCGKTCNADLDVATHNLTQVALTGKTMPKREEPRDAQGTAPARKTKKASKSKAPPAEREDQTPAQEPSQTS

SEQ ID NO: 3 - protein, 765 aa, Unknown
  Description of Unknown: CasPhi sequence
MYILEMADLKSEPSLLAKLLRDRFPGKYWLPKYWKLAEKKRLTGGEEAACEYMADKQLDSPPPNFRPPARCVILAKSRPFEDWPVHRVASKAQSFVIGLSEQGFAALRAAPPSTADARRDWLRSHGASEDDLMALEAQLLETIMGNAISLHGGVLKKIDNANVKAAKRLSGRNEARLNKGLQELPPEQEGSAYGADGLLVNPPGLNLNIYCRKSCCPKPVKNTARFVGHYPGYLRDSDSILISGTMDRLTIIEGMPGHIPAWQREQGLVKPGGRRRRLSGSESNMRQKVDPSTGPRRSTRSGTVNRSNQRTGRNGDPLLVEIRMKEDWVLLDARGLLRNLRWRESKRGLSCDHEDLSLSGLLALFSGDPVIDPVRNEVVFLYGEGIIPVRSTKPVGTRQSKKLLERQASMGPLTLISCDLGQTNLIAGRASAISLTHGSLGVRSSVRIELDPEIIKSFERLRKDADRLETEILTAAKETLSDEQRGEVNSHEKDSPQTAKASLCRELGLHPPSLPWGQMGPSTTFIADMLISHGRDDDAFLSHGEFPTLEKRKKFDKRFCLESRPLLSSETRKALNESLWEVKRTSSEYARLSQRKKEMARRAVNFVVEISRRKTGLSNVIVNIEDLNVRIFHGGGKQAPGWDGFFRPKSENRWFIQAIHKAFSDLAAHHGIPVIESDPQRTSMTCPECGHCDSKNRNGVRFLCKGCGASMDADFDAACRNLERVALTGKPMPKPSTSCERLLSATTGKVCSDHSLSHDAIEKAS

SEQ ID NO: 4 - protein, 766 aa, Unknown
  Description of Unknown: CasPhi sequence
MEKEITELTKIRREFPNKKFSSTDMKKAGKLLKAEGPDAVRDFLNSCQEIIGDFKPPVKTNIVSISRPFEEWPVSMVGRAIQEYYFSLTKEELESVHPGTSSEDHKSFFNITGLSNYNYTSVQGLNLIFKNAKAIYDGTLVKANNKNKKLEKKFNEINHKRSLEGLPIITPDFEEPFDENGHLNNPPGINRNIYGYQGCAAKVFVPSKHKMVSLPKEYEGYNRDPNLSLAGFRNRLEIPEGEPGHVPWFQRMDIPEGQIGHVNKIQRFNFVHGKNSGKVKFSDKTGRVKRYHHSKYKDATKPYKFLEESKKVSALDSILAIITIGDDWVVFDIRGLYRNVFYRELAQKGLTAVQLLDLFTGDPVIDPKKGVVTFSYKEGVVPVFSQKIVPRFKSRDTLEKLTSQGPVALLSVDLGQNEPVAARVCSLKNINDKITLDNSCRISFLDDYKKQIKDYRDSLDELEIKIRLEAINSLETNQQVEIRDLDVFSADRAKANTVDMFDIDPNLISWDSMSDARVSTQISDLYLKNGGDESRVYFEINNKRIKRSDYNISQLVRPKLSDSTRKNLNDSIWKLKRTSEEYLKLSKRKLELSRAVVNYTIRQSKLLSGINDIVIILEDLDVKKKFNGRGIRDIGWDNFFSSRKENRWFIPAFHKAFSELSSNRGLCVIEVNPAWTSATCPDCGFCSKENRDGINFTCRKCGVSYHADIDVATLNIARVAVLGKPMSGPADRERLGDTKKPRVARSRKTMKRKDISNSTVEAMVTA

SEQ ID NO: 5 - protein, 812 aa, Unknown
  Description of Unknown: CasPhi sequence
MDMLDTETNYATETPAQQQDYSPKPPKKAQRAPKGFSKKARPEKKPPKPITLFTQKHFSGVRFLKRVIRDASKILKLSESRTITFLEQAIERDGSAPPDVTPPVHNTIMAVTRPFEEWPEVILSKALQKHCYALTKKIKIKTWPKKGPGKKCLAAWSARTKIPLIPGQVQATNGLFDRIGSIYDGVEKKVTNRNANKKLEYDEAIKEGRNPAVPEYETAYNIDGTLINKPGYNPNLYITQSRTPRLITEADRPLVEKILWQMVEKKTQSRNQARRARLEKAAHLQGLPVPKFVPEKVDRSQKIEIRIIDPLDKIEPYMPQDRMAIKASQDGHVPYWQRPFLSKRRNRRVRAGWGKQVSSIQAWLTGALLVIVRLGNEAFLADIRGALRNAQWRKLLKPDATYQSLFNLFTGDPVVNTRTNHLTMAYREGVVNIVKSRSFKGRQTREHLLTLLGQGKTVAGVSFDLGQKHAAGLLAAHFGLGEDGNPVFTPIQACFLPQRYLDSLTNYRNRYDALTLDMRRQSLLALTPAQQQEFADAQRDPGGQAKRACCLKLNLNPDEIRWDLVSGISTMISDLYIERGGDPRDVHQQVETKPKGKRKSEIRILKIRDGKWAYDFRPKIADETRKAQREQLWKLQKASSEFERLSRYKINIARAIANWALQWGRELSGCDIVIPVLEDLNVGSKFFDGKGKWLLGWDNRFTPKKENRWFIKVLHKAVAELAPHRGVPVYEVMPHRTSMTCPACHYCHPTNREGDRFECQSCHVVKNTDRDVAPYNILRVAVEGKTLDRWQAEKKPQAEPDRPMILIDNQES

SEQ ID NO: 6 - protein, 812 aa, Unknown
  Description of Unknown: CasPhi sequence
MDMLDTETNYATETPAQQQDYSPKPPKKAQRAPKGFSKKARPEKKPPKPITLFTQKHFSGVRFLKRVIRDASKILKLSESRTITFLEQAIERDGSAPPDVTPPVHNTIMAVTRPFEEWPEVILSKALQKHCYALTKKIKIKTWPKKGPGKKCLAAWSARTKIPLIPGQVQATNGLFDRIGSIYDGVEKKVTNRNANKKLEYDEAIKEGRNPAVPEYETAYNIDGTLINKPGYNPNLYITQSRTPRLITEADRPLVEKILWQMVEKKTQSRNQARRARLEKAAHLQGLPVPKFVPEKVDRSQKIEIRIIDPLDKIEPYMPQDRMAIKASQDGHVPYWQRPFLSKRRNRRVRAGWGKQVSSIQAWLTGALLVIVRLGNEAFLADIRGALRNAQWRKLLKPDATYQSLFNLFTGDPVVNTRTNHLTMAYREGVVDIVKSRSFKGRQTREHLLTLLGQGKTVAGVSFDLGQKHAAGLLAAHFGLGEDGNPVFTPIQACFLPQRYLDSLTNYRNRYDALTLDMRRQSLLALTPAQQQEFADAQRDPGGQAKRACCLKLNLNPDEIRWDLVSGISTMISDLYIERGGDPRDVHQQVETKPKGKRKSEIRILKIRDGKWAYDFRPKIADETRKAQREQLWKLQKASSEFERLSRYKINIARAIANWALQWGRELSGCDIVIPVLEDLNVGSKFFDGKGKWLLGWDNRFTPKKENRWFIKVLHKAVAELAPHKGVPVYEVMPHRTSMTCPACHYCHPTNREGDRFECQSCHVVKNTDRDVAPYNILRVAVEGKTLDRWQAEKKPQAEPDRPMILIDNQES

SEQ ID NO: 7 - protein, 793 aa, Unknown
  Description of Unknown: CasPhi sequence
MSSLPTPLELLKQKHADLFKGLQFSSKDNKMAGKVLKKDGEEAALAFLSERGVSRGELPNFRPPAKTLVVAQSRPFEEFPIYRVSEAIQLYVYSLSVKELETVPSGSSTKKEHQRFFQDSSVPDFGYTSVQGLNKIFGLARGIYLGVITRGENQLQKAKSKHEALNKKRRASGEAETEFDPTPYEYMTPERKLAKPPGVNHSIMCYVDISVDEFDFRNPDGIVLPSEYAGYCREINTAIEKGTVDRLGHLKGGPGYIPGHQRKESTTEGPKINFRKGRIRRSYTALYAKRDSRRVRQGKLALPSYRHHMMRLNSNAESAILAVIFFGKDWVVFDLRGLLRNVRWRNLFVDGSTPSTLLGMFGDPVIDPKRGVVAFCYKEQIVPVVSKSITKMVKAPELLNKLYLKSEDPLVLVAIDLGQTNPVGVGVYRVMNASLDYEVVTRFALESELLREIESYRQRTNAFEAQIRAETFDAMTSEEQEEITRVRAFSASKAKENVCHRFGMPVDAVDWATMGSNTIHIAKWVMRHGDPSLVEVLEYRKDNEIKLDKNGVPKKVKLTDKRIANLTSIRLRFSQETSKHYNDTMWELRRKHPVYQKLSKSKADFSRRVVNSIIRRVNHLVPRARIVFIIEDLKNLGKVFHGSGKRELGWDSYFEPKSENRWFIQVLHKAFSETGKHKGYYIIECWPNWTSCTCPKCSCCDSENRHGEVFRCLACGYTCNTDFGTAPDNLVKIATTGKGLPGPKKRCKGSSKGKNPKIARSSETGVSVTESGAPKVKKSSPTQTSQSSSQSAP

SEQ ID NO: 8 - protein, 441 aa, Unknown
  Description of Unknown: CasPhi sequence
MNKIEKEKTPLAKLMNENFAGLRFPFAIIKQAGKKLLKEGELKTIEYMTGKGSIEPLPNFKPPVKCLIVAKRRDLKYFPICKASCEIQSYVYSLNYKDFMDYFSTPMTSQKQHEEFFKKSGLNIEYQNVAGLNLIFNNVKNTYNGVILKVKNRNEKLKKKAIKNNYEFEEIKTFNDDGCLINKPGINNVIYCFQSISPKILKNITHLPKEYNDYDCSVDRNIIQKYVSRLDIPESQPGHVPEWQRKLPEFNNTNNPRRRRKWYSNGRNISKGYSVDQVNQAKIEDSLLAQIKIGEDWIILDIRGLLRDLNRRELISYKNKLTIKDVLGFFSDYPIIDIKKNLVTFCYKEGVIQVVSQKSIGNKKSKQLLEKLIENKPIALVSIDLGQTNPVSVKISKLNKINNKISIESFTYRFLNEEILKEIEKYRKDYDKLELKLINEA

SEQ ID NO: 9 - protein, 812 aa, Unknown
  Description of Unknown: CasPhi sequence
MDMLDTETNYATETPSQQQDYSPKPPKKDRRAPKGFSKKARPEKKPPKPITLFTQKHFSGVRFLKRVIRDASKILKLSESRTITFLEQAIERDGSAPPDVTPPVHNTIMAVTRPFEEWPEVILSKALQKHCYALTKKIKIKTWPKKGPGKKCLAAWSARTKIPLIPGQVQATNGLFDRIGSIYDGVEKKVTNRNANKKLEYDEAIKEGRNPAVPEYETAYNIDGTLINKPGYNPNLYITQSRTPRLITEADRPLVEKILWQMVEKKTQSRNQARRARLEKAAHLQGLPVPKFVPEKVDRSQKIEIRIIDPLDKIEPYMPQDRMAIKASQDGHVPYWQRPFLSKRRNRRVRAGWGKQVSSIQAWLTGALLVIVRLGNEAFLADIRGALRNAQWRKLLKPDATYQSLFNLFTGDPVVNTRTNHLTMAYREGVVDIVKSRSFKGRQTREHLLTLLGQGKTVAGVSFDLGQKHAAGLLAAHFGLGEDGNPVFTPIQACFLPQRYLDSLTNYRNRYDALTLDMRRQSLLALTPAQQQEFADAQRDPGGQAKRACCLKLNLNPDEIRWDLVSGISTMISDLYIERGGDPRDVHQQVETKPKGKRKSEIRILKIRDGKWAYDFRPKIADETRKAQREQLWKLQKASSEFERLSRYKINIARAIANWALQWGRELSGCDIVIPVLEDLNVGSKFFDGKGKWLLGWDNRFTPKKENRWFIKVLHKAVAELAPHRGVPVYEVMPHRTSMTCPACHYCHPTNREGDRFECQSCHVVKNTDRDVAPYNILRVAVEGKTLDRWQAEKKPQAEPDRPMILIDNQES

SEQ ID NO: 10 - protein, 812 aa, Unknown
  Description of Unknown: CasPhi sequence
MDMLDTETNYATETPSQQQDYSPKPPKKDRRAPKGFSKKARPEKKPPKPITLFTQKHFSGVRFLKRVIRDASKILKLSESRTITFLEQAIERDGSAPPDVTPPVHNTIMAVTRPFEEWPEVILSKALQKHCYALTKKIKIKTWPKKGPGKKCLAAWSARTKIPLIPGQVQATNGLFDRIGSIYDGVEKKVTNRNANKKLEYDEAIKEGRNPAVPEYETAYNIDGTLINKPGYNPNLYITQSRTPRLITEADRPLVEKILWQMVEKKTQSRNQARRARLEKAAHLQGLPVPKFVPEKVDRSQKIEIRIIDPLDKIEPYMPQDRMAIKASQDGHVPYWQRPFLSKRRNRRVRAGWGKQVSSIQAWLTGALLVIVRLGNEAFLADIRGALRNAQWRKLLKPDATYQSLFNLFTGDPVVNTRTNHLTMAYREGVVNIVKSRSFKGRQTREHLLTLLGQGKTVAGVSFDLGQKHAAGLLAAHFGLGEDGNPVFTPIQACFLPQRYLDSLTNYRNRYDALTLDMRRQSLLALTPAQQQEFADAQRDPGGQAKRACCLKLNLNPDEIRWDLVSGISTMISDLYIERGGDPRDVHQQVETKPKGKRKSEIRILKIRDGKWAYDFRPKIADETRKAQREQLWKLQKASSEFERLSRYKINIARAIANWALQWGRELSGCDIVIPVLEDLNVGSKFFDGKGKWLLGWDNRFTPKKENRWFIKVLHKAVAELAPHRGVPVYEVMPHRTSMTCPACHYCHPTNREGDRFECQSCHVVKNTDRDVAPYNILRVAVEGKTLDRWQAEKKPQAEPDRPMILIDNQES

SEQ ID NO: 11 - protein, 761 aa, Unknown
  Description of Unknown: CasPhi sequence
MSNKTTPPSPLSLLLRAHFPGLKFESQDYKIAGKKLRDGGPEAVISYLTGKGQAKLKDVKPPAKAFVIAQSRPFIEWDLVRVSRQIQEKIFGIPATKGRPKQDGLSETAFNEAVASLEVDGKSKLNEETRAAFYEVLGLDAPSLHAQAQNALIKSAISIREGVLKKVENRNEKNLSKTKRRKEAGEEATFVEEKAHDERGYLIHPPGVNQTIPGYQAVVIKSCPSDFIGLPSGCLAKESAEALTDYLPHDRMTIPKGQPGYVPEWQHPLLNRRKNRRRRDWYSASLNKPKATCSKRSGTPNRKNSRTDQIQSGRFKGAIPVLMRFQDEWVIIDIRGLLRNARYRKLLKEKSTIPDLLSLFTGDPSIDMRQGVCTFIYKAGQACSAKMVKTKNAPEILSELTKSGPVVLVSIDLGQTNPIAAKVSRVTQLSDGQLSHETLLRELLSNDSSDGKEIARYRVASDRLRDKLANLAVERLSPEHKSEILRAKNDTPALCKARVCAALGLNPEMIAWDKMTPYTEFLATAYLEKGGDRKVATLKPKNRPEMLRRDIKFKGTEGVRIEVSPEAAEAYREAQWDLQRTSPEYLRLSTWKQELTKRILNQLRHKAAKSSQCEVVVMAFEDLNIKMMHGNGKWADGGWDAFFIKKRENRWFMQAFHKSLTELGAHKGVPTIEVTPHRTSITCTKCGHCDKANRDGERFACQKCGFVAHADLEIATDNIERVALTGKPMPKPESERSGDAKKSVGARKAAFKPEEDAEAAE

SEQ ID NO: 12 - protein, 717 aa, Unknown
  Description of Unknown: CasPhi sequence
MIKPTVSQFLTPGFKLIRNHSRTAGLKLKNEGEEACKKFVRENEIPKDECPNFQGGPAIANIIAKSREFTEWEIYQSSLAIQEVIFTLPKDKLPEPILKEEWRAQWLSEHGLDTVPYKEAAGLNLIIKNAVNTYKGVQVKVDNKNKNNLAKINRKNEIAKLNGEQEISFEEIKAFDDKGYLLQKPSPNKSIYCYQSVSPKPFITSKYHNVNLPEEYIGYYRKSNEPIVSPYQFDRLRIPIGEPGYVPKWQYTFLSKKENKRRKLSKRIKNVSPILGIICIKKDWCVFDMRGLLRTNHWKKYHKPTDSINDLFDYFTGDPVIDTKANVVRFRYKMENGIVNYKPVREKKGKELLENICDQNGSCKLATVDVGQNNPVAIGLFELKKVNGELTKTLISRHPTPIDFCNKITAYRERYDKLESSIKLDAIKQLTSEQKIEVDNYNNNFTPQNTKQIVCSKLNINPNDLPWDKMISGTHFISEKAQVSNKSEIYFTSTDKGKTKDVMKSDYKWFQDYKPKLSKEVRDALSDIEWRLRRESLEFNKLSKSREQDARQLANWISSMCDVIGIENLVKKNNFFGGSGKREPGWDNFYKPKKENRWWINAIHKALTELSQNKGKRVILLPAMRTSITCPKCKYCDSKNRNGEKFNCLKCGIELNADIDVATENLATVAITAQSMPKPTCERSGDAKKPVRARKAKAPEFHDKLAPSYTVVLREAV

SEQ ID NO: 13 - protein, 781 aa, Unknown
  Description of Unknown: CasPhi sequence
MRQPAEKTAFQVFRQEVIGTQKLSGGDAKTAGRLYKQGKMEAAREWLLKGARDDVPPNFQPPAKCLVVAVSHPFEEWDISKTNHDVQAYIYAQPLQAEGHLNGLSEKWEDTSADQHKLWFEKTGVPDRGLPVQAINKIAKAAVNRAFGVVRKVENRNEKRRSRDNRIAEHNRENGLTEVVREAPEVATNADGFLLHPPGIDPSILSYASVSPVPYNSSKHSFVRLPEEYQAYNVEPDAPIPQFVVEDRFAIPPGQPGYVPEWQRLKCSTNKHRRMRQWSNQDYKPKAGRRAKPLEFQAHLTRERAKGALLVVMRIKEDWVVFDVRGLLRNVEWRKVLSEEAREKLTLKGLLDLFTGDPVIDTKRGIVTFLYKAEITKILSKRTVKTKNARDLLLRLTEPGEDGLRREVGLVAVDLGQTHPIAAAIYRIGRTSAGALESTVLHRQGLREDQKEKLKEYRKRHTALDSRLRKEAFETLSVEQQKEIVTVSGSGAQITKDKVCNYLGVDPSTLPWEKMGSYTHFISDDFLRRGGDPNIVHFDRQPKKGKVSKKSQRIKRSDSQWVGRMRPRLSQETAKARMEADWAAQNENEEYKRLARSKQELARWCVNTLLQNTRCITQCDEIVVVIEDLNVKSLHGKGAREPGWDNFFTPKTENRWFIQILHKTFSELPKHRGEHVIEGCPLRTSITCPACSYCDKNSRNGEKFVCVACGATFHADFEVATYNLVRLATTGMPMPKSLERQGGGEKAGGARKARKKAKQVEKIVVQANANVTMNGASLHSP

SEQ ID NO: 14 - protein, 793 aa, Unknown; identical to SEQ ID NO: 7
  Description of Unknown: CasPhi sequence

SEQ ID NO: 15 - protein, 717 aa, Unknown; identical to SEQ ID NO: 12
  Description of Unknown: CasPhi sequence

SEQ ID NO: 16 - protein, 761 aa, Unknown; identical to SEQ ID NO: 11
  Description of Unknown: CasPhi sequence

SEQ ID NO: 17 - protein, 765 aa, Unknown
  Description of Unknown: CasPhi sequence
MYSLEMADLKSEPSLLAKLLRDRFPGKYWLPKYWKLAEKKRLTGGEEAACEYMADKQLDSPPPNFRPPARCVILAKSRPFEDWPVHRVASKAQSFVIGLSEQGFAALRAAPPSTADARRDWLRSHGASEDDLMALEAQLLETIMGNAISLHGGVLKKIDNANVKAAKRLSGRNEARLNKGLQELPPEQEGSAYGADGLLVNPPGLNLNIYCRKSCCPKPVKNTARFVGHYPGYLRDSDSILISGTMDRLTIIEGMPGHIPAWQREQGLVKPGGRRRRLSGSESNMRQKVDPSTGPRRSTRSGTVNRSNQRTGRNGDPLLVEIRMKEDWVLLDARGLLRNLRWRESKRGLSCDHEDLSLSGLLALFSGDPVIDPVRNEVVFLYGEGIIPVRSTKPVGTRQSKKLLERQASMGPLTLISCDLGQTNLIAGRASAISLTHGSLGVRSSVRIELDPEIIKSFERLRKDADRLETEILTAAKETLSDEQRGEVNSHEKDSPQTAKASLCRELGLHPPSLPWGQMGPSTTFIADMLISHGRDDDAFLSHGEFPTLEKRKKFDKRFCLESRPLLSSETRKALNESLWEVKRTSSEYARLSQRKKEMARRAVNFVVEISRRKTGLSNVIVNIEDLNVRIFHGGGKQAPGWDGFFRPKSENRWFIQAIHKAFSDLAAHHGIPVIESDPQRTSMTCPECGHCDSKNRNGVRFLCKGCGASMDADFDAACRNLERVALTGKPMPKPSTSCERLLSATTGKVCSDHSLSHDAIEKAS

SEQ ID NO: 18 - protein, 766 aa, Unknown
  Description of Unknown: CasPhi sequence
MEKEITELTKIRREFPNKKFSSTDMKKAGKLLKAEGPDAVRDFLNSCQEIIGDFKPPVKTNIVSISRPFEEWPVSMVGRAIQEYYFSLTKEELESVHPGTSSEDHKSFFNITGLSNYNYTSVQGLNLIFKNAKAIYDGTLVKANNKNKKLEKKFNEINHKRSLEGLPIITPDFEEPFDENGHLNNPPGINRNIYGYQGCAAKVFVPSKHKMVSLPKEYEGYNRDPNLSLAGFRNRLEIPEGEPGHVPWFQRMDIPEGQIGHVNKIQRFNFVHGKNSGKVKFSDKTGRVKRYHHSKYKDATKPYKFLEESKKVSALDSILAIITIGDDWVVFDIRGLYRNVFYRELAQKGLTAVQLLDLFTGDPVIDPKKGVVTFSYKEGVVPVFSQKIVPRFKSRDTLEKLTSQGPVALLSVDLGQNEPVAARVCSLKNINDKITLDNSCRISFLDDYKKQIKDYRDSLDELEIKIRLEAINSLETNQQVEIRDLDVFSADRAKANTVDMFDIDPNLISWDSMSDARVSTQISDLYLKNGGDESRVYFEINNKRIKRSDYNISQLVRPKLSDSTRKNLNDSIWKLKRTSEEYLKLSKRKLELSRAVVNYTIRQSKLLSGINDIVIILEDLDVKKKFNGRGIRDIGWDNFFSSRKENRWFIPAFHKTFSELSSNRGLCVIEVNPAWTSATCPDCGFCSKENRDGINFTCRKCGVSYHADIDVATLNIARVAVLGKPMSGPADRERLGDTKKPRVARSRKTMKRKDISNSTVEAMVTA

SEQ ID NO: 19 - protein, 870 aa, Unknown
  Description of Unknown: CasPhi sequence
MLVRTSTLVQDNKNSRSASRAFLKKPKMPKNKHIKEPTELAKLIRELFPGQRFTRAINTQAGKILKHKGRDEVVEFLKNKGIDKEQFMDFRPPTKARIVATSGAIEEFSYLRVSMAIQECCFGKYKFPKEKVNGKLVLETVGLTKEELDDFLPKKYYENKKSRDRFFLKTGICDYGYTYAQGLNEIFRNTRAIYEGVFTKVNNRNEKRREKKDKYNEERRSKGLSEEPYDEDESATDESGHLINPPGVNLNIWTCEGFCKGPYVTKLSGTPGYEVILPKVFDGYNRDPNEIISCGITDRFAIPEGEPGHIPWHQRLEIPEGQPGYVPGHQRFADTGQNNSGKANPNKKGRMRKYYGHGTKYTQPGEYQEVFRKGHREGNKRRYWEEDFRSEAHDCILYVIHIGDDWVVCDLRGPLRDAYRRGLVPKEGITTQELCNLFSGDPVIDPKHGVVTFCYKNGLVRAQKTISAGKKSRELLGALTSQGPIALIGVDLGQTEPVGARAFIVNQARGSLSLPTLKGSFLLTAENSSSWNVFKGEIKAYREAIDDLAIRLKKEAVATLSVEQQTEIESYEAFSAEDAKQLACEKFGVDSSFILWEDMTPYHTGPATYYFAKQFLKKNGGNKSLIEYIPYQKKKSKKTPKAVLRSDYNIACCVRPKLLPETRKALNEAIRIVQKNSDEYQRLSKRKLEFCRRVVNYLVRKAKKLTGLERVIIAIEDLKSLEKFFTGSGKRDNGWSNFFRPKKENRWFIPAFHKAFSELAPNRGFYVIECNPARTSITDPDCGYCDGDNRDGIKFECKKCGAKHHTDLDVAPLNIAIVAVTGRPMPKTVSNKSKRERSGGEKSVGASRKRNHRKSKANQEMLDATSSAAE

SEQ ID NO: 20 - protein, 830 aa, Unknown
  Description of Unknown: CasPhi sequence
MPKIKKPTEISLLRKEVFPDLHFAKDRMRAASLVLKNEGREAAIEYLRVNHEDKPPNFMPPAKTPYVALSRPLEQWPIAQASIAIQKYIFGLTKDEFSATKKLLYGDKSTPNTESRKRWFEVTGVPNFGYMSAQGLNAIFSGALARYEGVVQKVENRNKKRFEKLSEKNQLLIEEGQPVKDYVPDTAYHTPETLQKLAENNHVRVEDLGDMIDRLVHPPGIHRSIYGYQQVPPFAYDPDNPKGIILPKAYAGYTRKPHDIIEAMPNRLNIPEGQAGYIPEHQRDKLKKGGRVKRLRTTRVRVDATETVRAKAEALNAEKARLRGKEAILAVFQIEEDWALIDMRGLLRNVYMRKLIAAGELTPTTLLGYFTETLTLDPRRTEATFCYHLRSEGALHAEYVRHGKNTRELLLDLTKDNEKIALVTIDLGQRNPLAAAIFRVGRDASGDLTENSLEPVSRMLLPQAYLDQIKAYRDAYDSFRQNIWDTALASLTPEQQRQILAYEAYTPDDSKENVLRLLLGGNVMPDDLPWEDMTKNTHYISDRYLADGGDPSKVWFVPGPRKRKKNAPPLKKPPKPRELVKRSDHNISHLSEFRPQLLKETRDAFEKAKIDTERGHVGYQKLSTRKDQLCKEILNWLEAEAVRLTRCKTMVLGLEDLNGPFFNQGKGKVRGWVSFFRQKQENRWIVNGFRKNALARAHDKGKYILELWPSWTSQTCPKCKHVHADNRHGDDFVCLQCGARLHADAEVATWNLAVVAIQGHSLPGPVREKSNDRKKSGSARKSKKANESGKVVGAWAAQATPKRATSKKETGTARNPVYNPLETQASCPAP

SEQ ID NO: 21 - protein, 790 aa, Unknown
  Description of Unknown: CasPhi sequence
MTPSPQIARLVETPLAAALKAHHPGKKFRSDYLKKAGKILKDQGVEAAMAHLDGKDQAEPPNFKPPAKCRIVARSREFSEWPIVKASVEIQKYIYGLTLEERKACDPGKSSASHKAWFAKTGVNTFGYSSVQGFNLIFGHTLGRYDGVLVKTENLNKKRAEKNERFRAKALAEGRAEPVCPPLVTATNDTGQDVTLEDGRVVRPGQLLQPPGINPNIYAYQQVSPKAYVPGIIELPEEFQGYSRDPNAVILPLVPRDRLSIPKGQPGYVPEPHREGLTGRKDRRMRRYYETERGTKLKRPPLTAKGRADKANEALLVVVRIDSDWVVMDVRGLLRNARWRRLVSKEGITLNGLLDLFTGDPVLNPKDCSVSRDTGDPVNDPRHGVVTFCYKLGVVDVCSKDRPIKGFRTKEVLERLTSSGTVGMVSIDLGQTNPVAAAVSRVTKGLQAETLETFTLPDDLLGKVRAYRAKTDRMEEGFRRNALRKLTAEQQAEITRYNDATEQQAKALVCSTYGIGPEEVPWERMTSNTTYISDHILDHGGDPDTVFFMATKRGQNKPTLHKRKDKAWGQKFRPAISVETRLARQAAEWELRRASLEFQKLSVWKTELCRQAVNYVMERTKKRTQCDVIIPVIEDLPVPLFHGSGKRDPGWANFFVHKRENRWFIDGLHKAFSELGKHRGIYVFEVCPQRTSITCPKCGHCDPDNRDGEKFVCLSCQATLNADLDVATTNLVRVALTGKVMPRSERSGDAQTPGPARKARTGKIKGSKPTSAPQGATQTDAKAHLSQTGV

SEQ ID NO: 22 - protein, 790 aa, Unknown
  Description of Unknown: CasPhi sequence
MTPSPQIARLVETPLAAALKAHHPGKKFRSDYLKKAGKILKDQGVEAAMAHLDGKDQAEPPNFKPPAKCRIVARSREFSEWPIVKASVEIQKYIYGLTLEERKACDPGKSSASHKAWFAKTGVNTFGYSSVQGFNLIFGHTLGRYDGVLVKTENLNKKRAEKNERFRAKALAEGRAEPVCPPLVTATNDTGQDVTLEDGRVVRPGQLLQPPGINPNIYAYQQVSPKAYVPGIIELPEEFQGYSRDPNAVILPLVPRDRLSIPKGQPGYVPEPHREGLTGRKDRRMRRYYETERGTKLKRPPLTAKGRADKANEALLVVVRIDSDWVVMDVRGLLRNARWRRLVSKEGITLNGLLDLFTGDPVLNPKDCSVSRDTGDPVNDPRHGVVTFCYKLGVVDVCSKDRPIKGFRTKEVLERLTSSGTVGMVSIDLGQTNPVAAAVSRVTKGLQAETLETFTLPDDLLGKVRAYRAKTDRMEEGFRRNALRKLTAEQQAEITRYNDATEQQAKALVCSTYGIGPEEVPWERMTSNTTYISDHILDHGGDPDTVFFMATKRGQNKPTLHKRKDKAWGQKFRPAISVETRLARQAAEWELRRASLEFQKLSVWKTELCRQAVNYVMERTKKRTQCDVIIPVIEDLPVPLFHGSGKRDPGWANFFVHKRENRWFIDGLHKAFSELGKHRGIYVFEVCPQRTSITCPKCGHCDPDNRDGEKFVCLSCQATLHADLDVATTNLVRVALTGKVMPRSERSGDAQTPGPARKARTGKIKGSKPTSAPQGATQTDAKAHLSQTGV

SEQ ID NO: 23 - protein, 782 aa, Unknown
  Description of Unknown: CasPhi sequence
MKTEKPKTALTLLREEVFPGKKYRLDVLKEAGKKLSTKGREATIEFLTGKDEERPQNFQPPAKTSIVAQSRPFDQWPIVQVSLAVQKYIYGLTQSEFEANKKALYGETGKAISTESRRAWFEATGVDNFGFTAAQGINPIFSQAVARYEGVIKKVENRNEKKLKKLTKKNLLRLESGEEIEDFEPEATFNEEGRLLQPPGANPNIYCYQQISPRIYDPSDPKGVILPQIYAGYDRKPEDIISAGVPNRLAIPEGQPGYIPEHQRAGLKTQGRIRCRASVEAKARAAILAVVHLGEDWVVLDLRGLLRNVYWRKLASPGTLTLKGLLDFFTGGPVLDARRGIATFSYTLKSAAAVHAENTYKGKGTREVLLKLTENNSVALVTVDLGQRNPLAAMIARVSRTSQGDLTYPESVEPLTRLFLPDPFLEEVRKYRSSYDALRLSIREAAIASLTPEQQAEIRYIEKFSAGDAKKNVAEVFGIDPTQLPWDAMTPRTTYISDLFLRMGGDRSRVFFEVPPKKAKKAPKKPPKKPAGPRIVKRTDGMIARLREIRPRLSAETNKAFQEARWEGERSNVAFQKLSVRRKQFARTVVNHLVQTAQKMSRCDTVVLGIEDLNVPFFHGRGKYQPGWEGFFRQKKENRWLINDMHKALSERGPHRGGYVLELTPFWTSLRCPKCGHTDSANRDGDDFVCVKCGAKLHSDLEVATANLALVAITGQSIPRPPREQSSGKKSTGTARMKKTSGETQGKGSKACVSEALNKIEQGTARDPVYNPLNSQVSCPAP

SEQ ID NO: 24 - protein, 774 aa, Unknown
  Description of Unknown: CasPhi sequence
VYNPDMKKPNNIRRIREEHFEGLCFGKDVLTKAGKIYEKDGEEAAIDFLMGKDEEDPPNFKPPAKTTIVAQSRPFDQWPIYQVSQAVQERVFAYTEEEFNASKEALFSGDISSKSRDFWFKTNNISDQGIGAQGLNTILSHAFSRYSGVIKKVENRNKKRLKKLSKKNQLKIEEGLEILEFKPDSAFNENGLLAQPPGINPNIYGYQAVTPFVFDPDNPGDVILPKQYEGYSRKPDDIIEKGPSRLDIPKGQPGYVPEHQRKNLKKKGRVRLYRRTPPKTKALASILAVLQIGKDWVLFDMRGLLRSVYMREAATPGQISAKDLLDTFTGCPVLNTRTGEFTFCYKLRSEGALHARKIYTKGETRTLLTSLTSENNTIALVTVDLGQRNPAAIMISRLSRKEELSEKDIQPVSRRLLPDRYLNELKRYRDAYDAFRQEVRDEAFTSLCPEHQEQVQQYEALTPEKAKNLVLKHFFGTHDPDLPWDDMTSNTHYIANLYLERGGDPSKVFFTRPLKKDSKSKKPRKPTKRTDASISRLPEIRPKMPEDARKAFEKAKWEIYTGHEKFPKLAKRVNQLCREIANWIEKEAKRLTLCDTVVVGIEDLSLPPKRGKGKFQETWQGFFRQKFENRWVIDTLKKAIQNRAHDKGKYVLGLAPYWTSQRCPACGFIHKSNRNGDHFKCLKCEALFHADSEVATWNLALVAVLGKGITNPDSKKPSGQKKTGTTRKKQIKGKNKGKETVNVPPTTQEVEDIIAFFEKDDETVRNPVYKPTGT

SEQ ID NO: 25 - protein, 769 aa, Unknown
  Description of Unknown: CasPhi sequence
MKKPNNIRRIREEHFEGLCFGKDVLTKAGKIYEKDGEEAAIDFLMGKDEEDPPNFKPPAKTTIVAQSRPFDQWPIYQVSQAVQERVFAYTEEEFNASKEALFSGDISSKSRDFWFKTNNISDQGIGAQGLNTILSHAFSRYSGVIKKVENRNKKRLKKLSKKNQLKIEEGLEILEFKPDSAFNENGLLAQPPGINPNIYGYQAVTPFVFDPDNPGDVILPKQYEGYSRKPDDIIEKGPSRLDIPKGQPGYVPEHQRKNLKKKGRVRLYRRTPPKTKALASILAVLQIGKDWVLFDMRGLLRSVYMREAATPGQISAKDLLDTFTGCPVLNTRTGEFTFCYKLRSEGALHARKIYTKGETRTLLTSLTSENNTIALVTVDLGQRNPAAIMISRLSRKEELSEKDIQPVSRRLLPDRYLNELKRYRDAYDAFRQEVRDEAFTSLCPEHQEQVQQYEALTPEKAKNLVLKHFFGTHDPDLPWDDMTSNTHYIANLYLERGGDPSKVFFTRPLKKDSKSKKPRKPTKRTDASISRLPEIRPKMPEDARKAFEKAKWEIYTGHEKFPKLAKRVNQLCREIANWIEKEAKRLTLCDTVVVGIEDLSLPPKRGKGKFQETWQGFFRQKFENRWVIDTLKKAIQNRAHDKGKYVLGLAPYWTSQRCPACGFIHKSNRNGDHFKCLKCEALFHADSEVATWNLALVAVLGKGITNPDSKKPSGQKKTGTTRKKQIKGKNKGKETVNVPPTTQEVEDIIAFFEKDDETVRNPVYKPTGT

SEQ ID NO: 26 - protein, 767 aa, Unknown
  Description of Unknown: CasPhi sequence
VIKTHFPAGRFRKDHQKTAGKKLKHEGEEACVEYLRNKVSDYPPNFKPPAKGTIVAQSRPFSEWPIVRASEAIQKYVYGLTVAELDVFSPGTSKPSHAEWFAKTGVENYGYRQVQGLNTIFQNTVNRFKGVLKKVENRNKKSLKRQEGANRRRVEEGLPEVPVTVESATDDEGRLLQPPGVNPSIYGYQGVAPRVCTDLQGFSGMSVDFAGYRRDPDAVLVESLPEGRLSIPKGERGYVPEWQRDPERNKFPLREGSRRQRKWYSNACHKPKPGRTSKYDPEALKKASAKDALLVSISIGEDWAIIDVRGLLRDARRRGFTPEEGLSLNSLLGLFTEYPVFDVQRGLITFTYKLGQVDVHSRKTVPTFRSRALLESLVAKEEIALVSVDLGQTNPASMKVSRVRAQEGALVAEPVHRMFLSDVLLGELSSYRKRMDAFEDAIRAQAFETMTPEQQAEITRVCDVSVEVARRRVCEKYSISPQDVPWGEMTGHSTFIVDAVLRKGGDESLVYFKNKEGETLKFRDLRISRMEGVRPRLTKDTRDALNKAVLDLKRAHPTFAKLAKQKLELARRCVNFIEREAKRYTQCERVVFVIEDLNVGFFHGKGKRDRGWDAFFTAKKENRWVIQALHKAFSDLGLHRGSYVIEVTPQRTSMTCPRCGHCDKGNRNGEKFVCLQCGATLHADLEVATDNIERVALTGKAMPKPPVRERSGDVQKAGTARKARKPLKPKQKTEPSVQEGSSDDGVDKSPGDASRNPVYNPSDTLSI

SEQ ID NO: 27 - protein, 763 aa, Unknown
  Description of Unknown: CasPhi sequence
MAKAKTLAALLRELLPGQHLAPHHRWVANKLLMTSGDAAAFVIGKSVSDPVRGSFRKDVITKAGRIFKKDGPDAAAAFLDGKWEDRPPNFQPPAKAAIVAISRSFDEWPIVKVSCAIQQYLYALPVQEFESSVPEARAQAHAAWFQDTGVDDCNFKSTQGLNAIFNHGKRTYEGVLKKAQNRNDKKNLRLERINAKRAEAGQAPLVAGPDESPTDDAGCLLHPPGINANIYCYQQVSPRPYEQSCGIQLPPEYAGYNRLSNVAIPPMPNRLDIPQGQPGYVPEHHRHGIKKFGRVRKRYGVVPGRNRDADGKRTRQVLTEAGAAAKARDSVLAVIRIGDDWTVVDLRGLLRNAQWRKLVPDGGITVQGLLDLFTGDPVIDPRRGVVTFIYKADSVGIHSEKVCRGKQSKNLLERLCAMPEKSSTRLDCARQAVALVSVDLGQRNPVAARFSRVSLAEGQLQAQLVSAQFLDDAMVAMIRSYREEYDRFESLVREQAKAALSPEQLSEIVRHEADSAESVKSCVCAKFGIDPAGLSWDKMTSGTWRIADHVQAAGGDVEWFFFKTCGKGKEIKTVRRSDFNVAKQFRLRLSPETRKDWNDAIWELKRGNPAYVSFSKRKSEFARRVVNDLVHRARRAVRCDEVVFAIEDLNISFFHGKGQRQMGWDAFFEVKQENRWFIQALHKAFVERATHKGGYVLEVAPARTSTTCPECRHCDPESRRGEQFCCIKCRHTCHADLEVATFNIEQVALTGVSLPKRLSSTLL

SEQ ID NO: 28 - protein, 761 aa, Unknown
  Description of Unknown: CasPhi sequence
MSKEKTPPSAYAILKAKHFPDLDFEKKHKMMAGRMFKNGASEQEVVQYLQGKGSESLMDVKPPAKSPILAQSRPFDEWEMVRTSRLIQETIFGIPKRGSIPKRDGLSETQFNELVASLEVGGKPMLNKQTRAIFYGLLGIKPPTFHAMAQNILIDLAINIRKGVLKKVDNLNEKNRKKVKRIRDAGEQDVMVPAEVTAHDDRGYLNHPPGVNPTIPGYQGVVIPFPEGFEGLPSGMTPVDWSHVLVDYLPHDRLSIPKGSPGYIPEWQRPLLNRHKGRRHRSWYANSLNKPRKSRTEEAKDRQNAGKRTALIEAERLKGVLPVLMRFKEDWLIIDARGLLRNARYRGVLPEGSTLGNLIDLFSDSPRVDTRRGICTFLYRKGRAYSTKPVKRKESKETLLKLTEKSTIALVSIDLGQTNPLTAKLSKVRQVDGCLVAEPVLRKLIDNASEDGKEIARYRVAHDLLRARILEDAIDLLGIYKDEVVRARSDTPDLCKERVCRFLGLDSQAIDWDRMTPYTDFIAQAFVAKGGDPKVVTIKPNGKPKMFRKDRSIKNMKGIRLDISKEASSAYREAQWAIQRESPDFQRLAVWQSQLTKRIVNQLVAWAKKCTQCDTVVLAFEDLNIGMMHGSGKWANGGWNALFLHKQENRWFMQAFHKALTELSAHKGIPTIEVLPHRTSITCTQCGHCHPGNRDGERFKCLKCEFLANTDLEIATDNIERVALTGLPMPKGERSSAKRKPGGTRKTKKSKHSGNSPLAAE

SEQ ID NO: 29 - protein, 746 aa, Unknown
  Description of Unknown: CasPhi sequence
MEKAGPTSPLSVLIHKNFEGCRFQIDHLKIAGRKLAREGEAAAIEYLLDKKCEGLPPNFQPPAKGNVIAQSRPFTEWAPYRASVAIQKYIYSLSVDERKVCDPGSSSDSHEKWFKQTGVQNYGYTHVQGLNLIFKHALARYDGVLKKVDNRNEKNRKKAERVNSFRREEGLPEEVFEEEKATDETGHLLQPPGVNHSIYCYQSVRPKPFNPRKPGGISLPEAYSGYSLKPQDELPIGSLDRLSIPPGQPGYVPEWQRSQLTTQKHRRKRSWYSAQKWKPRTGRTSTFDPDRLNCARAQGAILAVVRIHEDWVVFDVRGLLRNALWRELAGKGLTVRDLLDFFTGDPVVDTKRGVVTFTYKLGKVDVHSLRTVRGKRSKKVLEDLTLSSDVGLVTIDLGQTNVLAADYSKVTRSENGELLAVPLSKSFLPKHLLHEVTAYRTSYDQMEEGFRRKALLTLTEDQQVEVTLVRDFSVESSKTKLLQLGVDVTSLPWEKMSSNTTYISDQLLQQGADPASLFFDGERDGKPCRHKKKDRTWAYLVRPKVSPETRKALNEALWALKNTSPEFESLSKRKIQFSRRCMNYLLNEAKRISGCGQVVFVIEDLNVRVHHGRGKRAIGWDNFFKPKRENRWFMQALHKAASELAIHRGMHIIEACPARSSITCPKCGHCDPENRCSSDREKFLCVKCGAAFHADLEVATFNLRKVALTGTALPKSIDHSRDGLIPKGARNRKLKEPQANDEKACA

SEQ ID NO: 30 - protein, 735 aa, Unknown
  Description of Unknown: CasPhi sequence
MKEQSPLSSVLKSNFPGKKFLSADIRVAGRKLAQLGEAAAVEYLSPRQRDSVPNFRPPAFCTVVAKSRPFEEWPIYKASVLLQEQIYGMTGQEFEERCGSIPTSLSGLRQWASSVGLGAAMEGLHVQGMNLMVKNAINRYKGVLVKVENRNKKLVEANEAKNSSREERGLPPLRPPELGSAFGPDGRLVNPPGIDKSIRLYQGVSPVPVVKTTGRPTVHRLDIPAGEKGHVPLWQREAGLVKEGPRRRRMWYSNSNLKRSRKDRSAEASEARKADSVVVRVSVKEDWVDIDVRGLLRNVAWRGIERAGESTEDLLSLFSGDPVVDPSRDSVVFLYKEGVVDVLSKKVVGAGKSRKQLEKMVSEGPVALVSCDLGQTNYVAARVSVLDESLSPVRSFRVDPREFPSADGSQGVVGSLDRIRADSDRLEAKLLSEAEASLPEPVRAEIEFLRSERPSAVAGRLCLKLGIDPRSIPWEKMGSTTSFISEALSAKGSPLALHDGAPIKDSRFAHAARGRLSPESRKALNEALWERKSSSREYGVISRRKSEASRRMANAVLSESRRLTGLAVVAVNLEDLNMVSKFFHGRGKRAPGWAGFFTPKMENRWFIRSIHKAMCDLSKHRGITVIESRPERTSISCPECGHCDPENRSGERFSCKSCGVSLHADFEVATRNLERVALTGKPMPRRENLHSPEGATASRKTRKKPREATASTFLDLRSVLSSAENEGSGPAARAG

SEQ ID NO: 31 - protein, 725 aa, Unknown
  Description of Unknown: CasPhi sequence
MLPPSNKIGKSMSLKEFINKRNFKSSIIKQAGKILKKEGEEAVKKYLDDNYVEGYKKRDFPITAKCNIVASNRKIEDFDISKFSSFIQNYVFNLNKDNFEEFSKIKYNRKSFDELYKKIANEIGLEKPNYENIQGEIAVIRNAINIYNGVLKKVENRNKKIQEKNQSKDPPKLLSAFDDNGFLAERPGINETIYGYQSVRLRHLDVEKDKDIIVQLPDIYQKYNKKSTDKISVKKRLNKYNVDEYGKLISKRRKERINKDDAILCVSNFGDDWIIFDARGLLRQTYRYKLKKKGLCIKDLLNLFTGDPIINPTKTDLKEALSLSFKDGIINNRTLKVKNYKKCPELISELIRDKGKVAMISIDLGQTNPISYRLSKFTANNVAYIENGVISEDDIVKMKKWREKSDKLENLIKEEAIASLSDDEQREVRLYENDIADNTKKKILEKFNIREEDLDFSKMSNNTYFIRDCLKNKNIDESEFTFEKNGKKLDPTDACFAREYKNKLSELTRKKINEKIWEIKKNSKEYHKISIYKKETIRYIVNKLIKQSKEKSECDDIIVNIEKLQIGGNFFGGRGKRDPGWNNFFLPKEENRWFINACHKAFSELAPHKGIIVIESDPAYTSQTCPKCENCDKENRNGEKFKCKKCNYEANADIDVATENLEKIAKNGRRLIKNFDQLGERLPGAEMPGGARKRKPSKSLPKNGRGAGVGSEPELINQSPSQVIA

SEQ ID NO: 32 - protein, 718 aa, Unknown
  Description of Unknown: CasPhi sequence
VPDKKETPLVALCKKSFPGLRFKKHDSRQAGRILKSKGEGAAVAFLEGKGGTTQPNFKPPVKCNIVAMSRPLEEWPIYKASVVIQKYVYAQSYEEFKATDPGKSEAGLRAWLKATRVDTDGYFNVQGLNLIFQNARATYEGVLKKVENRNSKKVAKIEQRNEHRAERGLPLLTLDEPETALDETGHLRHRPGINCSVFGYQHMKLKPYVPGSIPGVTGYSRDPSTPIAACGVDRLEIPEGQPGYVPPWDRENLSVKKHRRKRASWARSRGGAIDDNMLLAVVRVADDWALLDLRGLLRNTQYRKLLDRSVPVTIESLLNLVTNDPTLSVVKKPGKPVRYTATLIYKQGVVPVVKAKVVKGSYVSKMLDDTTETFSLVGVDLGVNNLIAANALRIRPGKCVERLQAFTLPEQTVEDFFRFRKAYDKHQENLRLAAVRSLTAEQQAEVLALDTFGPEQAKMQVCGHLGLSVDEVPWDKVNSRSSILSDLAKERGVDDTLYMFPFFKGKGKKRKTEIRKRWDVNWAQHFRPQLTSETRKALNEAKWEAERNSSKYHQLSIRKKELSRHCVNYVIRTAEKRAQCGKVIVAVEDLHHSFRRGGKGSRKSGWGGFFAAKQEGRWLMDALFGAFCDLAVHRGYRVIKVDPYNTSRTCPECGHCDKANRDRVNREAFICVCCGYRGNADIDVAAYNIAMVAITGVSLRKAARASVASTPLESLAAE

SEQ ID NO: 33 - protein, 708 aa, Unknown
  Description of Unknown: CasPhi sequence
MSKTKELNDYQEALARRLPGVRHQKSVRRAARLVYDRQGEDAMVAFLDGKEVDEPYTLQPPAKCHILAVSRPIEEWPIARVTMAVQEHVYALPVHEVEKSRPETTEGSRSAWFKNSGVSNHGVTHAQTLNAILKNAYNVYNGVIKKVENRNAKKRDSLAAKNKSRERKGLPHFKADPPELATDEQGYLLQPPSPNSSVYLVQQHLRTPQIDLPSGYTGPVVDPRSPIPSLIPIDRLAIPPGQPGYVPLHDREKLTSNKHRRMKLPKSLRAQGALPVCFRVFDDWAVVDGRGLLRHAQYRRLAPKNVSIAELLELYTGDPVIDIKRNLMTFRFAEAVVEVTARKIVEKYHNKYLLKLTEPKGKPVREIGLVSIDLNVQRLIALAIYRVHQTGESQLALSPCLHREILPAKGLGDFDKYKSKFNQLTEEILTAAVQTLTSAQQEEYQRYVEESSHEAKADLCLKYSITPHELAWDKMTSSTQYISRWLRDHGWNASDFTQITKGRKKVERLWSDSRWAQELKPKLSNETRRKLEDAKHDLQRANPEWQRLAKRKQEYSRHLANTVLSMAREYTACETVVIAIENLPMKGGFVDGNGSRESGWDNFFTHKKENRWMIKDIHKALSDLAPNRGVHVLEVNPQYTSQTCPECGHRDKANRDPIQRERFCCTHCGAQRHADLEVATHNIAMVATTGKSLTGKSLAPQRLQEAAE

SEQ ID NO: 34 - protein, 491 aa, Unknown
  Description of Unknown: CasPhi sequence
VLLSDRIQYTDPSAPIPAMTVVDRRKIKKGEPGYVPPFMRKNLSTNKHRRMRLSRGQKEACALPVGLRLPDGKDGWDFIIFDGRALLRACRRLRLEVTSMDDVLDKFTGDPRIQLSPAGETIVTCMLKPQHTGVIQQKLITGKMKDRLVQLTAEAPIAMLTVDLGEHNLVACGAYTVGQRRGKLQSERLEAFLLPEKVLADFEGYRRDSDEHSETLRHEALKALSKRQQREVLDMLRTGADQARESLCYKYGLDLQALPWDKMSSNSTFIAQHLMSLGFGESATHVRYRPKRKASERTILKYDSRFAAEEKIKLTDETRRAWNEAIWECQRASQEFRCLSVRKLQLARAAVNWTLTQAKQRSRCPRVVVVVEDLNVRFMHGGGKRQEGWAGFFKARSEKRWFIQALHKAYTELPTNRGIHVMEVNPARTSITCTKCGYCDPENRYGEDFHCRNPKCKVRGGHVANADLDIATENLARVALSGPMPKAPKLK

SEQ ID NO: 35 - protein, 848 aa, Unknown
  Description of Unknown: CasPhi sequence
MTPSFGYQMIIVTPIHHASGAWATLRLLFLNPKTSGVMLGMTKTKSAFALMREEVFPGLLFKSADLKMAGRKFAKEGREAAIEYLRGKDEERPANFKPPAKGDIIAQSRPFDQWPIVQVSQAIQKYIFGLTKAEFDATKTLLYGEGNHPTTESRRRWFEATGVPDFGFTSAQGLNAIFSSALARYEGVIQKVENRNEKRLKKLSEKNQRLVEEGHAVEAYVPETAFHTLESLKALSEKSLVPLDDLMDKIDRLAQPPGINPCLYGYQQVAPYIYDPENPRGVVLPDLYLGYCRKPDDPITACPNRLDIPKGQPGYIPEHQRGQLKKHGRVRRFRYTNPQAKARAKAQTAILAVLRIDEDWVVMDLRGLLRNVYFREVAAPGELTARTLLDTFTGCPVLNLRSNVVTFCYDIESKGALHAEYVRKGWATRNKLLDLTKDGQSVALLSVDLGQRHPVAVMISRLKRDDKGDLSEKSIQVVSRTFADQYVDKLKRYRVQYDALRKEIYDAALVSLPPEQQAEIRAYEAFAPGDAKANVLSVMFQGEVSPDELPWDKMNTNTHYISDLYLRRGGDPSRVFFVPQPSTPKKNAKKPPAPRKPVKRTDENVSHMPEFRPHLSNETREAFQKAKWTMERGNVRYAQLSRFLNQIVREANNWLVSEAKKLTQCQTVVWAIEDLHVPFFHGKGKYHETWDGFFRQKKEDRWFVNVFHKAISERAPNKGEYVMEVAPYRTSQRCPVCGFVDADNRHGDHFKCLRCGVELHADLEVATWNIALVAVQGHGIAGPPREQSCGGETAGTARKGKNIKKNKGLADAVTVEAQDSEGGSKKDAGTARNPVYIPSESQVNCPAP

SEQ ID NO: 36 - protein, 781 aa, Unknown
  Description of Unknown: CasPhi sequence
MKPKTPKPPKTPVAALIDKHFPGKRFRASYLKSVGKKLKNQGEDVAVRFLTGKDEERPPNFQPPAKSNIVAQSRPIEEWPIHKVSVAVQEYVYGLTVAEKEACSDAGESSSSHAAWFAKTGVENFGYTSVQGLNKIFPPTFNRFDGVIKKVENRNEKKRQKATRINEAKRNKGQSEDPPEAEVKATDDAGYLLQPPGINHSVYGYQSITLCPYTAEKFPTIKLPEEYAGYHSNPDAPIPAGVPDRLAIPEGQPGHVPEEHRAGLSTKKHRRVRQWYAMANWKPKPKRTSKPDYDRLAKARAQGALLIVIRIDEDWVVVDARGLLRNVRWRSLGKREITPNELLDLFTGDPVLDLKRGVVTFTYAEGVVNVCSRSTTKGKQTKVLLDAMTAPRDGKKRQIGMVAVDLGQTNPIAAEYSRVGKNAAGTLEATPLSRSTLPDELLREIALYRKAHDRLEAQLREEAVLKLTAEQQAENARYVETSEEGAKLALANLGVDTSTLPWDAMTGWSTCISDHLINHGGDTSAVFFQTIRKGTKKLETIKRKDSSWADIVRPRLTKETREALNDFLWELKRSHEGYEKLSKRLEELARRAVNHVVQEVKWLTQCQDIVIVIEDLNVRNFHGGGKRGGGWSNFFTVKKENRWFMQALHKAFSDLAAHRGIPVLEVYPARTSITCLGCGHCDPENRDGEAFVCQQCGATFHADLEVATRNIARVALTGEAMPKAPAREQPGGAKKRGTSRRRKLTEVAVKSAEPTIHQAKNQQLNGTSRDPVYKGSELPAL

SEQ ID NO: 37 - protein, 767 aa, Unknown
  Description of Unknown: CasPhi sequence
MSEITDLLKANFKGKTFKSADMRMAGRILKKSGAQAVIKYLSDKGAVDPPDFRPPAKCNIIAQSRPFDEWPICKASMAIQQHIYGLTKNEFDESSPGTSSASHEQWFAKTGVDTHGFTHVQGLNLIFQHAKKRYEGVIKKVENYNEKERKKFEGINERRSKEGMPLLEPRLRTAFGDDGKFAEKPGVNPSIYLYQQTSPRPYDKTKHPYVHAPFELKEITTIPTQDDRLKIPFGAPGHVPEKHRSQLSMAKHKRRRAWYALSQNKPRPPKDGSKGRRSVRDLADLKAASLADAIPLVSRVGFDWVVIDGRGLLRNLRWRKLAHEGMTVEEMLGFFSGDPVIDPRRNVATFIYKAEHATVKSRKPIGGAKRAREELLKATASSDGVIRQVGLISVDLGQTNPVAYEISRMHQANGELVAEHLEYGLLNDEQVNSIQRYRAAWDSMNESFRQKAIESLSMEAQDEIMQASTGAAKRTREAVLTMFGPNATLPWSRMSSNTTCISDALIEVGKEEETNFVTSNGPRKRTDAQWAAYLRPRVNPETRALLNQAVWDLMKRSDEYERLSKRKLEMARQCVNFVVARAEKLTQCNNIGIVLENLVVRNFHGSGRRESGWEGFFEPKRENRWFMQVLHKAFSDLAQHRGVMVFEVHPAYSSQTCPACRYVDPKNRSSEDRERFKCLKCGRSFNADREVATFNIREIARTGVGLPKPDCERSRGVQTTGTARNPGRSLKSNKNPSEPKRVLQSKTRKKITSTETQNEPLATDLKT

SEQ ID NO: 38 - protein, 760 aa, Unknown
  Description of Unknown: CasPhi sequence
MTPKTESPLSALCKKHFPGKRFRTNYLKDAGKILKKHGEDAVVAFLSDKQEDEPANFCPPAKVHILAQSRPFEDWPINLASKAIQTYVYGLTADERKTCEPGTSKESHDRWFKETGVDHHGFTSVQGLNLIFKHTLNRYDGVIKKVETRNEKRRSSVVRINEKKAAEGLPLIAAEAEETAFGEDGRLLQPPGVNHSIYCFQQVSPQPYSSKKHPQVVLPHAVQGVDPDAPIPVGRPNRLDIPKGQPGYVPEWQRPHLSMKCKRVRMWYARANWRRKPGRRSVLNEARLKEASAKGALPIVLVIGDDWLVMDARGLLRSVFWRRVAKPGLSLSELLNVTPTGLFSGDPVIDPKRGLVTFTSKLGVVAVHSRKPTRGKKSKDLLLKMTKPTDDGMPRHVGMVAIDLGQTNPVAAEYSRVVQSDAGTLKQEPVSRGVLPDDLLKDVARYRRAYDLTEESIRQEAIALLSEGHRAEVTKLDQTTANETKRLLVDRGVSESLPWEKMSSNTTYISDCLVALGKTDDVFFVPKAKKGKKETGIAVKRKDHGWSKLLRPRTSPEARKALNENQWAVKRASPEYERLSRRKLELGRRCVNHIIQETKRWTQCEDIVVVLEDLNVGFFHGSGKRPDGWDNFFVSKRENRWFIQVLHKAFGDLATHRGTHVIEVHPARTSITCIKCGHCDAGNRDGESFVCLASACGDRRHADLEVATRNVARVAITGERMPPSEQARDVQKAGGARKRKPSARNVKSSYPAVEPAPASP

SEQ ID NO: 39 - protein, 752 aa, Unknown
  Description of Unknown: CasPhi sequence
MSDNKMKKLSKEEKPLTPLQILIRKYIDKSQYPSGFKTTIIKQAGVRIKSVKSEQDEINLANWIISKYDPTYIKRDFNPSAKCQIIATSRSVADFDIVKMSNKVQEIFFASSHLDKNVFDIGKSKSDHDSWFERNNVDRGIYTYSNVQGMNLIFSNTKNTYLGVAVKAQNKFSSKMKRIQDINNFRITNHQSPLPIPDEIKIYDDAGFLLNPPGVNPNIFGYQSCLLKPLENKEIISKTSFPEYSRLPADMIEVNYKISNRLKFSNDQKGFIQFKDKLNLFKINSQELFSKRRRLSGQPILLVASFGDDWVVLDGRGLLRQVYYRGIAKPGSITISELLGFFTGDPIVDPIRGVVSLGFKPGVLSQETLKTTSARIFAEKLPNLVLNNNVGLMSIDLGQTNPVSYRLSEITSNMSVEHICSDFLSQDQISSIEKAKTSLDNLEEEIAIKAVDHLSDEDKINFANFSKLNLPEDTRQSLFEKYPELIGSKLDFGSMGSGTSYIADELIKFENKDAFYPSGKKKFDLSFSRDLRKKLSDETRKSYNDALFLEKRTNDKYLKNAKRRKQIVRTVANSLVSKIEELGLTPVINIENLAMSGGFFDGRGKREKGWDNFFKVKKENRWVMKDFHKAFSELSPHHGVIVIESPPYCTSVTCTKCNFCDKKNRNGHKFTCQRCGLDANADLDIATENLEKVAISGKRMPGSERSSDERKVAVARKAKSPKGKAIKGVKCTITDEPALLSANSQDCSQSTS

SEQ ID NO: 40 - protein, 747 aa, Unknown
  Description of Unknown: CasPhi sequence
MALSLAEVRERHFKGLRFRSSYLKRAGKILKKEGEAACVAYLTGKDEESPPNFKPPAKCDVVAQSRPFEEWPIVQASVAVQSYVYGLTKEAFEAFNPGTTKQSHEACLAATGIDTCGYSNVQGLNLIFRQAKNRYEGVITKVENRNKKAKKKLTRKNEWRQKNGHSELPEAPEELTFNDEGRLLQPPGINPSLYTYQQISPTPWSPKDSSILPPQYAGYERDPNAPIPFGVAKDRLTIASGCPGYIPEWMRTAGEKTNPRTQKKFMHPGLSTRKNKRMRLPRSVRSAPLGALLVTIHLGEDWLVLDVRGLLRNARWRGVAPKDISTQGLLNLFTGDPVIDTRRGVVTFTYKPETVGIHSRTWLYKGKQTKEVLEKLTQDQTVALVAIDLGQTNPVSAAASRVSRSGENLSIETVDRFFLPDELIKELRLYRMAHDRLEERIREESTLALTEAQQAEVRALEHVVRDDAKNKVCAAFNLDAASLPWDQMTSNTTYLSEAILAQGVSRDQVFFTPNPKKGSKEPVEVMRKDRAWVYAFKAKLSEETRKAKNEALWALKRASPDYARLSKRREELCRRSVNMVINRAKKRTQCQVVIPVLEDLNIGFFHGSGKRLPGWDNFFVAKKENRWLMNGLHKSFSDLAVHRGFYVFEVMPHRTSITCPACGHCDSENRDGEAFVCLSCKRTYHADLDVATHNLTQVAGTGLPMPEREHPGGTKKPGGSRKPESPQTHAPILHRTDYSESADRLGS

SEQ ID NO: 41 - protein, 733 aa, Unknown
  Description of Unknown: CasPhi sequence
QAVIKYLSDKGAVDPPDFRPPAKCNIIAQSRPFDEWPICKASMAIQQHIYGLTKNEFDESSPGTSSASHEQWFAKTGVDTHGFTHVQGLNLIFQHAKKRYEGVIKKVENYNEKERKKFEGINERRSKEGMPLLEPRLRTAFGDDGKFAEKPGVNPSIYLYQQTSPRPYDKTKHPYVHAPFELKEITTIPTQDDRLKIPFGAPGHVPEKHRSQLSMAKHKRRRAWYALSQNKPRPPKDGSKGRRSVRDLADLKAASLADAIPLVSRVGFDWVVIDGRGLLRNLRWRKLAHEGMTVEEMLGFFSGDPVIDPRRNVATFIYKAEHATVKSRKPIGGAKRAREELLKATASSDGVIRQVGLISVDLGQTNPVAYEISRMHQANGELVAEHLEYGLLNDEQVNSIQRYRAAWDSMNESFRQKAIESLSMEAQDEIMQASTGAAKRTREAVLTMFGPNATLPWSRMSSNTTCISDALIEVGKEEETNFVTSNGPRKRTDAQWAAYLRPRVNPETRALLNQAVWDLMKRSDEYERLSKRKLEMARQCVNFVVARAEKLTQCNNIGIVLENLVVRNFHGSGRRESGWEGFFEPKRENRWFMQVLHKAFSDLAQHRGVMVFEVHPAYSSQTCPACRYVDPKNRSSEDRERFKCLKCGRSFNADREVATFNIREIARTGVGLPKPDCERSRDVQTPGTARKSGRSLKSQDNLSEPKRVLQSKTRKKITSTETQNEPLATDLKT

SEQ ID NO: 42 - protein, 702 aa, Unknown
  Description of Unknown: CasPhi sequence
MIKEQSELSKLIEKYYPGKKFYSNDLKQAGKHLKKSEHLTAKESEELTVEFLKSCKEKLYDFRPPAKALIISTSRPFEEWPIYKASESIQKYIYSLTKEELEKYNISTDKTSQENFFKESLIDNYGFANVSGLNLIFQHTKAIYDGVLKKVNNRNNKILKKYKRKIEEGIEIDSPELEKAIDESGHFINPPGINKNIYCYQQVSPTIFNSFKETKIICPFNYKRNPNDIIQKGVIDRLAIPFGEPGYIPDHQRDKVNKHKKRIRKYYKNNENKNKDAILAKINIGEDWVLFDLRGLLRNAYWRKLIPKQGITPQQLLDMFSGDPVIDPIKNNITFIYKESIIPIHSESIIKTKKSKELLEKLTKDEQIALVSIDLGQTNPVAARFSRLSSDLKPEHVSSSFLPDELKNEICRYREKSDLLEIEIKNKAIKMLSQEQQDEIKLVNDISSEELKNSVCKKYNIDNSKIPWDKMNGFTTFIADEFINNGGDKSLVYFTAKDKKSKKEKLVKLSDKKIANSFKPKISKETREILNKITWDEKISSNEYKKLSKRKLEFARRATNYLINQAKKATRLNNVVLVVEDLNSKFFHGSGKREDGWDNFFIPKKENRWFIQALHKSLTDVSIHRGINVIEVRPERTSITCPKCGCCDKENRKGEDFKCIKCDSVYHADLEVATFNIEKVAITGESMPKPDCERLGGEESIG

SEQ ID NO: 43 - protein, 661 aa, Unknown
  Description of Unknown: CasPhi sequence
VAFLDGKEVDEPYTLQPPAKCHILAVSRPIEEWPIARVTMAVQEHVYALPVHEVEKSRPETTEGSRSAWFKNSGVSNHGVTHAQTLNAILKNAYNVYNGVIKKVENRNAKKRDSLAAKNKSRERKGLPHFKADPPELATDEQGYLLQPPSPNSSVYLVQQHLRTPQIDLPSGYTGPVVDPRSPIPSLIPIDRLAIPPGQPGYVPLHDREKLTSNKHRRMKLPKSLRAQGALPVCFRVFDDWAVVDGRGLLRHAQYRRLAPKNVSIAELLELYTGDPVIDIKRNLMTFRFAEAVVEVTARKIVEKYHNKYLLKLTEPKGKPVREIGLVSIDLNVQRLIALAIYRVHQTGESQLALSPCLHREILPAKGLGDFDKYKSKFNQLTEEILTAAVQTLTSAQQEEYQRYVEESSHEAKADLCLKYSITPHELAWDKMTSSTQYISRWLRDHGWNASDFTQITKGRKKVERLWSDSRWAQELKPKLSNETRRKLEDAKHDLQRANPEWQRLAKRKQEYSRHLANTVLSMAREYTACETVVIAIENLPMKGGFVDGNGSRESGWDNFFTHKKENRWMIKDIHKALSDLAPNRGVHVLEVNPQYTSQTCPECGHRDKANRDPIQRERFCCTHCGAQRHADLEVATHNIAMVATTGKSLTGKSLAPQRLQ

SEQ ID NO: 44 - protein, 531 aa, Unknown
  Description of Unknown: CasPhi sequence
LEIPEGEPGHVPWFQRMDIPEGQIGHVNKIQRFNFVHGKNSGKVKFSDKTGRVKRYHHSKYKDATKPYKFLEESKKVSALDSILAIITIGDDWVVFDIRGLYRNVFYRELAQKGLTAVQLLDLFTGDPVIDPKKGIITFSYKEGVVPVFSQKIVSRFKSRDTLEKLTSQGPVALLSVDLGQNEPVAARVCSLKNINDKIALDNSCRIPFLDDYKKQIKDYRDSLDELEIKIRLEAINSLDVNQQVEIRDLDVFSADRAKASTVDMFDIDPNLISWDSMSDARFSTQISDLYLKNGGDESRVYFEINNKRIKRSDYNISQLVRPKLSDSTRKNLNDSIWKLKRTSEEYLKLSKRKLELSRAVVNYTIRQSKLLSGINDIVIILEDLDVKKKFNGRGIRDIGWDNFFSSRKENRWFIPAFHKSFSELSSNRGLCVIEVNPAWTSATCPDCGFCSKENRDGINFTCRKCGVSYHADIDVATLNIARVAVLGKPMSGPADRERLGGTKKPRVARSRKDMKRKDISNGTVEVMVTA

SEQ ID NO: 45 - protein, 479 aa, Unknown
  Description of Unknown: CasPhi sequence
IPSFGYLDRLKIAKGQPGYIPEWQRETINPSKKVRRYWATNHEKIRNAIPLVVFIGDDWVIIDGRGLLRDARRRKLADKNTTIEQLLEMVSNDPVIDSTRGIATLSYVEGVVPVRSFIPIGEKKGREYLEKSTQKESVTLLSVDIGQINPVSCGVYKVSNGCSKIDFLDKFFLDKKHLDAIQKYRTLQDSLEASIVNEALDEIDPSFKKEYQNINSQTSNDVKKSLCTEYNIDPEAISWQDITAHSTLISDYLIDNNITNDVYRTVNKAKYKTNDFGWYKKFSAKLSKEAREALNEKIWELKIASSKYKKLSVRKKEIARTIANDCVKRAETYGDNVVVAMESLTKNNKVMSGRGKRDPGWHNLGQAKVENRWFIQAISSAFEDKATHHGTPVLKVNPAYTSQTCPSCGHCSKDNRSSKDRTIFVCKSCGEKFNADLDVATYNIAHVAFSGKKLSPPSEKSSATKKPRSARKSKKSRKS

SEQ ID NO: 46 - protein, 452 aa, Unknown
  Description of Unknown: CasPhi sequence
SPIEKLLNGLLVKITFGNDWIICDARGLLDNVQKGIIHKSYFTNKSSLVDLIDLFTCNPIVNYKNNVVTFCYKEGVVDVKSFTPIKSGPKTQENLIKKLKYSRFQNEKDACVLGVGVDVGVTNPFAINGFKMPVDESSEWVMLNEPLFTIETSQAFREEIMAYQQRTDEMNDQFNQQSIDLLPPEYKVEFDNLPEDINEVAKYNLLHTLNIPNNFLWDKMSNTTQFISDYLIQIGRGTETEKTITTKKGKEKILTIRDVNWFNTFKPKISEETGKARTEIKRDLQKNSDQFQKLAKSREQSCRTWVNNVTEEAKIKSGCPLIIFVIEALVKDNRVFSGKGHRAIGWHNFGKQKNERRWWVQAIHKAFQEQGVNHGYPVILCPPQYTSQTCPKCNHVDRDNRSGEKFKCLKYGWIGNADLDVGAYNIARVAITGKALSKPLEQKKIKKAKNKT

SEQ ID NO: 47 - protein, 425 aa, Unknown
  Description of Unknown: CasPhi sequence
LLDNVQKGIIHKSYFTNKSSLVDLIDLFTCNPIVNYKNNVVTFCYKEGVVDVKSFTPIKSGPKTQENLIKKLKYSRFQNEKDACVLGVGVDVGVTNPFAINGFKMPVDESSEWVMLNEPLFTIETSQAFREEIMAYQQRTDEMNDQFNQQSIDLLPPEYKVEFDNLPEDINEVAKYNLLHTLNIPNNFLWDKMSNTTQFISDYLIQIGRGTETEKTITTKKGKEKILTIRDVNWFNTFKPKISEETGKARTEIKRDLQKNSDQFQKLAKSREQSCRTWVNNVTEEAKIKSGCPLIIFVIEALVKDNRVFSGKGHRAIGWHNFGKQKNERRWWVQAIHKAFQEQGVNHGYPVILCPPQYTSQTCPKCNHVDRDNRSGEKFKCLKYGWIGNADLDVGAYNIARVAITGKALSKPLEQKKIKKAKNKT

SEQ ID NO: 48 - DNA, 36 bp, Artificial Sequence
  Description of Artificial Sequence: Synthetic oligonucleotide
ggagagatctcaaacgattgctcgattagtcgagac

SEQ ID NO: 49 - DNA, 36 bp, Artificial Sequence
  Description of Artificial Sequence: Synthetic oligonucleotide
gtcggaacgctcaacgattgcccctcacgaggggac

SEQ ID NO: 50 - DNA, 36 bp, Artificial Sequence
  Description of Artificial Sequence: Synthetic oligonucleotide
accaaaacgactattgattgcccagtacgctgggac

SEQ ID NO: 51 - DNA, 37 bp, Artificial Sequence
  Description of Artificial Sequence: Synthetic oligonucleotide
ggatccaatcctttttgattgcccaattcgttgggac

SEQ ID NO: 52 - DNA, 36 bp, Artificial Sequence
  Description of Artificial Sequence: Synthetic oligonucleotide
ggatctgaggatcattattgctcgttacgacgagac

SEQ ID NO: 53 - DNA, 36 bp, Artificial Sequence
  Description of Artificial Sequence: Synthetic oligonucleotide
cctgcgaaaccttttgattgctcagtacgctgagac

SEQ ID NO: 54 - DNA, 36 bp, Artificial Sequence
  Description of Artificial Sequence: Synthetic oligonucleotide
ctttcaagactaatagattgctccttacgaggagac

SEQ ID NO: 55 - DNA, 36 bp, Artificial Sequence
  Description of Artificial Sequence: Synthetic oligonucleotide
gtagaagacctcgctgattgctcggtgcgccgagac

SEQ ID NO: 56 - DNA, 36 bp, Artificial Sequence
  Description of Artificial Sequence: Synthetic oligonucleotide
atggcaacagactctcattgcgcggtacgccgcgac

SEQ ID NO: 57 - DNA, 36 bp, Artificial Sequence; identical to SEQ ID NO: 50
  Description of Artificial Sequence: Synthetic oligonucleotide

SEQ ID NO: 58 - DNA, 34 bp, Artificial Sequence
  Description of Artificial Sequence: Synthetic oligonucleotide
gtcgctctctaacgcttgcccagtacgctgggac

SEQ ID NO: 59 - DNA, 36 bp, Artificial Sequence
  Description of Artificial Sequence: Synthetic oligonucleotide
gctggaagactcaatgatggctccttacgaggagac

SEQ ID NO: 60 - DNA, 37 bp, Artificial Sequence
  Description of Artificial Sequence: Synthetic oligonucleotide
ggttgaaccctcaacagattgctcggtaagccgagac

SEQ ID NO: 61 - DNA, 37 bp, Artificial Sequence; identical to SEQ ID NO: 60
  Description of Artificial Sequence: Synthetic oligonucleotide

SEQ ID NO: 62 - DNA, 36 bp, Artificial Sequence
  Description of Artificial Sequence: Synthetic oligonucleotide
cttgaaatcctgtcagattgctcccttcggggagac

SEQ ID NO: 63 - DNA, 36 bp, Artificial Sequence; identical to SEQ ID NO: 59
  Description of Artificial Sequence: Synthetic oligonucleotide

SEQ ID NO: 64 - DNA, 36 bp, Artificial Sequence; identical to SEQ ID NO: 59
  Description of Artificial Sequence: Synthetic oligonucleotide

SEQ ID NO: 65 - DNA, 36 bp, Artificial Sequence
  Description of Artificial Sequence: Synthetic oligonucleotide
ctaggaacgcacgcagattgctcggtacgccgagac

SEQ ID NO: 66 - DNA, 36 bp, Artificial Sequence
  Description of Artificial Sequence: Synthetic oligonucleotide
attgcaacgcctaaagattgctcgatacgtcgagac

SEQ ID NO: 67 - DNA, 36 bp, Artificial Sequence
  Description of Artificial Sequence: Synthetic oligonucleotide
gttcggcraycctttgattgctcagtacgctgagac

SEQ ID NO: 68 - DNA, 36 bp, Artificial Sequence
  Description of Artificial Sequence: Synthetic oligonucleotide
gttgaacctagatcagatggctcagtacgctgagac

SEQ ID NO: 69 - DNA, 36 bp, Artificial Sequence
  Description of Artificial Sequence: Synthetic oligonucleotide
ccctcaacacgtcagaaatgcccggcacgccgggac

SEQ ID NO: 70 - DNA, 36 bp, Artificial Sequence
  Description of Artificial Sequence: Synthetic oligonucleotide
gtcgcaagactcgaataattgcccctctatggggac

SEQ ID NO: 71 - DNA, 37 bp, Artificial Sequence
  Description of Artificial Sequence: Synthetic oligonucleotide
gctggggaccgatcctgattgctcgctgcggcgagac

SEQ ID NO: 72 - DNA, 36 bp, Artificial Sequence
  Description of Artificial Sequence: Synthetic oligonucleotide
ctctcaatggataacgattgctctctacggagagac

SEQ ID NO: 73 - DNA, 36 bp, Artificial Sequence; identical to SEQ ID NO: 59
  Description of Artificial Sequence: Synthetic oligonucleotide

SEQ ID NO: 74 - DNA, 36 bp, Artificial Sequence
  Description of Artificial Sequence: Synthetic oligonucleotide
gttgaaccctcaacagattgctcggtaagccgagac

SEQ ID NO: 75 - DNA, 36 bp, Artificial Sequence; identical to SEQ ID NO: 70
  Description of Artificial Sequence: Synthetic oligonucleotide

SEQ ID NO: 76 - DNA, 36 bp, Artificial Sequence; identical to SEQ ID NO: 49
  Description of Artificial Sequence: Synthetic oligonucleotide

SEQ ID NO: 77 - DNA, 36 bp, Artificial Sequence; identical to SEQ ID NO: 68
  Description of Artificial Sequence: Synthetic oligonucleotide

SEQ ID NO: 78 - DNA, 36 bp, Artificial Sequence; identical to SEQ ID NO: 72
  Description of Artificial Sequence: Synthetic oligonucleotide

SEQ ID NO: 79 - DNA, 36 bp, Artificial Sequence
  Description of Artificial Sequence: Synthetic oligonucleotide
actgaaaccaccaacgattgcgctcctcggagcgac

SEQ ID NO: 80 - DNA, 36 bp, Artificial Sequence; identical to SEQ ID NO: 50
  Description of Artificial Sequence: Synthetic oligonucleotide

SEQ ID NO: 81 - DNA, 36 bp, Artificial Sequence; identical to SEQ ID NO: 68
  Description of Artificial Sequence: Synthetic oligonucleotide

SEQ ID NO: 82 - DNA, 36 bp, Artificial Sequence; identical to SEQ ID NO: 74
  Description of Artificial Sequence: Synthetic oligonucleotide

SEQ ID NO: 83 - DNA, 36 bp, Artificial Sequence; identical to SEQ ID NO: 68
  Description of Artificial Sequence: Synthetic oligonucleotide

SEQ ID NO: 84 - DNA, 36 bp, Artificial Sequence; identical to SEQ ID NO: 49
  Description of Artificial Sequence: Synthetic oligonucleotide

SEQ ID NO: 85 - DNA, 37 bp, Artificial Sequence; identical to SEQ ID NO: 60
  Description of Artificial Sequence: Synthetic oligonucleotide

SEQ ID NO: 86 - DNA, 37 bp, Artificial Sequence; identical to SEQ ID NO: 60
  Description of Artificial Sequence: Synthetic oligonucleotide

SEQ ID NO: 87-94 - skipped (8 entries)

SEQ ID NO: 95 - DNA, 8 bp, Artificial Sequence
  Description of Artificial Sequence: Synthetic oligonucleotide
ttattatt

SEQ ID NO: 96 - DNA, 6 bp, Artificial Sequence
  Description of Artificial Sequence: Synthetic oligonucleotide
tttttt

SEQ ID NO: 97 - DNA, 8 bp, Artificial Sequence
  Description of Artificial Sequence: Synthetic oligonucleotide
tttttttt

SEQ ID NO: 98 - DNA, 10 bp, Artificial Sequence
  Description of Artificial Sequence: Synthetic oligonucleotide
tttttttttt

SEQ ID NO: 99 - DNA, 12 bp, Artificial Sequence
  Description of Artificial Sequence: Synthetic oligonucleotide
tttttttttttt

SEQ ID NO: 100 - DNA, 14 bp, Artificial Sequence
  Description of Artificial Sequence: Synthetic oligonucleotide
tttttttttttttt

SEQ ID NO: 101 - DNA, 6 bp, Artificial Sequence
  Description of Artificial Sequence: Synthetic oligonucleotide
aaaaaa

SEQ ID NO: 102 - DNA, 6 bp, Artificial Sequence
  Description of Artificial Sequence: Synthetic oligonucleotide
cccccc

SEQ ID NO: 103 - DNA, 6 bp, Artificial Sequence
  Description of Artificial Sequence: Synthetic oligonucleotide
gggggg

SEQ ID NO: 104 - DNA, 8 bp, Artificial Sequence
  Description of Artificial Sequence: Synthetic oligonucleotide
ttattatt

SEQ ID NO: 105 - protein, 735 aa, Unknown
  Description of Unknown: CasPhi sequence
MIKPTVSQFLTPGFKLIRNHSRTAGLKLKNEGEEACKKFVRENEIPKDECPNFQGGPAIANIIAKSREFTEWEIYQSSLAIQEVIFTLPKDKLPEPILKEEWRAQWLSEHGLDTVPYKEAAGLNLIIKNAVNTYKGVQVKVDNKNKNNLAKINRKNEIAKLNGEQEISFEEIKAFDDKGYLLQKPSPNKSIYCYQSVSPKPFITSKYHNVNLPEEYIGYYRKSNEPIVSPYQFDRLRIPIGEPGYVPKWQYTFLSKKENKRRKLSKRIKNVSPILGIICIKKDWCVFDMRGLLRTNHWKKYHKPTDSINDLFDYFTGDPVIDTKANVVRFRYKMENGIVNYKPVREKKGKELLENICDQNGSCKLATVDVGQNNPVAIGLFELKKVNGELTKTLISRHPTPIDFCNKITAYRERYDKLESSIKLDAIKQLTSEQKIEVDNYNNNFTPQNTKQIVCSKLNINPNDLPWDKMISGTHFISEKAQVSNKSEIYFTSTDKGKTKDVMKSDYKWFQDYKPKLSKEVRDALSDIEWRLRRESLEFNKLSKSREQDARQLANWISSMCDVIGIENLVKKNNFFGGSGKREPGWDNFYKPKKENRWWINAIHKALTELSQNKGKRVILLPAMRTSITCPKCKYCDSKNRNGEKFNCLKCGIELNADIDVATENLATVAITAQSMPKPTCERSGDAKKPVRARKAKAPEFHDKLAPSYTVVLREAVKRPAATKKAGQAKKKKEF

SEQ ID NO: 106 - protein, 18 aa, Unknown
  Description of Unknown: Nucleoplasmin NLS sequence
KRPAATKKAGQAKKKKEF

SEQ ID NO: 107 - protein, 753 aa, Unknown
  Description of Unknown: CasPhi sequence
SNAPKKKRKVGIHGVPAAMIKPTVSQFLTPGFKLIRNHSRTAGLKLKNEGEEACKKFVRENEIPKDECPNFQGGPAIANIIAKSREFTEWEIYQSSLAIQEVIFTLPKDKLPEPILKEEWRAQWLSEHGLDTVPYKEAAGLNLIIKNAVNTYKGVQVKVDNKNKNNLAKINRKNEIAKLNGEQEISFEEIKAFDDKGYLLQKPSPNKSIYCYQSVSPKPFITSKYHNVNLPEEYIGYYRKSNEPIVSPYQFDRLRIPIGEPGYVPKWQYTFLSKKENKRRKLSKRIKNVSPILGIICIKKDWCVFDMRGLLRTNHWKKYHKPTDSINDLFDYFTGDPVIDTKANVVRFRYKMENGIVNYKPVREKKGKELLENICDQNGSCKLATVDVGQNNPVAIGLFELKKVNGELTKTLISRHPTPIDFCNKITAYRERYDKLESSIKLDAIKQLTSEQKIEVDNYNNNFTPQNTKQIVCSKLNINPNDLPWDKMISGTHFISEKAQVSNKSEIYFTSTDKGKTKDVMKSDYKWFQDYKPKLSKEVRDALSDIEWRLRRESLEFNKLSKSREQDARQLANWISSMCDVIGIENLVKKNNFFGGSGKREPGWDNFYKPKKENRWWINAIHKALTELSQNKGKRVILLPAMRTSITCPKCKYCDSKNRNGEKFNCLKCGIELNADIDVATENLATVAITAQSMPKPTCERSGDAKKPVRARKAKAPEFHDKLAPSYTVVLREAVKRPAATKKAGQAKKKKEF

SEQ ID NO: 108 - DNA, 30 bp, Artificial Sequence
  Description of Artificial Sequence: Synthetic oligonucleotide
tattaaatactcgtattgctgttcgattat

SEQ ID NO: 109 - DNA, 30 bp, Artificial Sequence
  Description of Artificial Sequence: Synthetic oligonucleotide
cacagcttgtctgtaagcggatgccatatg

SEQ ID NO: 110 - protein, 7 aa, Macaca mulatta polyomavirus 1
PKKKRKV

SEQ ID NO: 111 - protein, 9 aa, Unknown
  Description of Unknown: C-myc NLS sequence
PAAKRVKLD

SEQ ID NO: 112 - protein, 15 aa, Macaca mulatta polyomavirus 1
PKKKRKVGIHGVPAA

SEQ ID NO: 113 - protein, 10 aa, Artificial Sequence
  Description of Artificial Sequence: Synthetic peptide
MISKMIKPTV

SEQ ID NO: 114 - protein, 10 aa, Artificial Sequence
  Description of Artificial Sequence: Synthetic peptide
MISKMIKPTV

SEQ ID NO: 115 - protein, 4 aa, Artificial Sequence
  Description of Artificial Sequence: Synthetic peptide
MISK

SEQ ID NO: 116 - DNA, 30 bp, Artificial Sequence; identical to SEQ ID NO: 108
  Description of Artificial Sequence: Synthetic oligonucleotide

SEQ ID NO: 117 - DNA, 30 bp, Artificial Sequence; identical to SEQ ID NO: 109
  Description of Artificial Sequence: Synthetic oligonucleotide

SEQ ID NO: 118 - DNA, 20 bp, Artificial Sequence
  Description of Artificial Sequence: Synthetic oligonucleotide
tggatatctgtgggacaaga

SEQ ID NO: 119 - DNA, 20 bp, Artificial Sequence
  Description of Artificial Sequence: Synthetic oligonucleotide
tcccacagatatccagaacc

SEQ ID NO: 120 - DNA, 20 bp, Artificial Sequence
  Description of Artificial Sequence: Synthetic oligonucleotide
gagtctctcagctggtacac

SEQ ID NO: 121 - DNA, 20 bp, Artificial Sequence
  Description of Artificial Sequence: Synthetic oligonucleotide
agagtctctcagctggtaca

SEQ ID NO: 122 - DNA, 20 bp, Artificial Sequence
  Description of Artificial Sequence: Synthetic oligonucleotide
tcactggatttagagtctct

SEQ ID NO: 123 - DNA, 20 bp, Artificial Sequence
  Description of Artificial Sequence: Synthetic oligonucleotide
agaatcaaaatcggtgaata

SEQ ID NO: 124 - DNA, 20 bp, Artificial Sequence
  Description of Artificial Sequence: Synthetic oligonucleotide
gagaatcaaaatcggtgaat

SEQ ID NO: 125 - DNA, 20 bp, Artificial Sequence
  Description of Artificial Sequence: Synthetic oligonucleotide
accgattttgattctcaaac

SEQ ID NO: 126 - DNA, 20 bp, Artificial Sequence
  Description of Artificial Sequence: Synthetic oligonucleotide
tttgagaatcaaaatcggtg

SEQ ID NO: 127 - DNA, 20 bp, Artificial Sequence
  Description of Artificial Sequence: Synthetic oligonucleotide
gtttgagaatcaaaatcggt

SEQ ID NO: 128 - DNA, 20 bp, Artificial Sequence
  Description of Artificial Sequence: Synthetic oligonucleotide
tgattctcaaacaaatgtgt

SEQ ID NO: 129 - DNA, 20 bp, Artificial Sequence
  Description of Artificial Sequence: Synthetic oligonucleotide
gattctcaaacaaatgtgtc

SEQ ID NO: 130 - DNA, 20 bp, Artificial Sequence
  Description of Artificial Sequence: Synthetic oligonucleotide
attctcaaacaaatgtgtca

SEQ ID NO: 131 - DNA, 20 bp, Artificial Sequence
  Description of Artificial Sequence: Synthetic oligonucleotide
tgacacatttgtttgagaat

SEQ ID NO: 132 - DNA, 20 bp, Artificial Sequence
  Description of Artificial Sequence: Synthetic oligonucleotide
tcaaacaaatgtgtcacaaa

SEQ ID NO: 133 - DNA, 20 bp, Artificial Sequence
  Description of Artificial Sequence: Synthetic oligonucleotide
gtgacacatttgtttgagaa

SEQ ID NO: 134 - DNA, 20 bp, Artificial Sequence
  Description of Artificial Sequence: Synthetic oligonucleotide
ctttgtgacacatttgtttg

SEQ ID NO: 135 - DNA, 20 bp, Artificial Sequence
  Description of Artificial Sequence: Synthetic oligonucleotide
tgatgtgtatatcacagaca

SEQ ID NO: 136 - DNA, 20 bp, Artificial Sequence
  Description of Artificial Sequence: Synthetic oligonucleotide
tctgtgatatacacatcaga

SEQ ID NO: 137 - DNA, 20 bp, Artificial Sequence
  Description of Artificial Sequence: Synthetic oligonucleotide
gtctgtgatatacacatcag

SEQ ID NO: 138 - DNA, 20 bp, Artificial Sequence
  Description of Artificial Sequence: Synthetic oligonucleotide
tgtctgtgatatacacatca

SEQ ID NO: 139 - DNA, 20 bp, Artificial Sequence
  Description of Artificial Sequence: Synthetic oligonucleotide
aagtccatagacctcatgtc

SEQ ID NO: 140 - DNA, 20 bp, Artificial Sequence
  Description of Artificial Sequence: Synthetic oligonucleotide
ctcttgaagtccatagacct

SEQ ID NO: 141 - DNA, 20 bp, Artificial Sequence
  Description of Artificial Sequence: Synthetic oligonucleotide
aagagcaacagtgctgtggc

SEQ ID NO: 142 - DNA, 20 bp, Artificial Sequence
  Description of Artificial Sequence: Synthetic oligonucleotide
ctccaggccacagcactgtt

SEQ ID NO: 143 - DNA, 20 bp, Artificial Sequence
  Description of Artificial Sequence: Synthetic oligonucleotide
ttgctccaggccacagcact

SEQ ID NO: 144 - DNA, 20 bp, Artificial Sequence
  Description of Artificial Sequence: Synthetic oligonucleotide
gttgctccaggccacagcac

SEQ ID NO: 145 - DNA, 20 bp, Artificial Sequence
  Description of Artificial Sequence: Synthetic oligonucleotide
cacatgcaaagtcagatttg

SEQ ID NO: 146 - DNA, 20 bp, Artificial Sequence
  Description of Artificial Sequence: Synthetic oligonucleotide
gcacatgcaaagtcagattt

SEQ ID NO: 147 - DNA, 20 bp, Artificial Sequence
  Description of Artificial Sequence: Synthetic oligonucleotide
gcatgtgcaaacgccttcaa

SEQ ID NO: 148 - DNA, 20 bp, Artificial Sequence
  Description of Artificial Sequence: Synthetic oligonucleotide
aaggcgtttgcacatgcaaa

SEQ ID NO: 149 - DNA, 20 bp, Artificial Sequence
  Description of Artificial Sequence: Synthetic oligonucleotide
catgtgcaaacgccttcaac

SEQ ID NO: 150 - DNA, 20 bp, Artificial Sequence
  Description of Artificial Sequence: Synthetic oligonucleotide
ttgaaggcgtttgcacatgc

SEQ ID NO: 151 - DNA, 20 bp, Artificial Sequence
  Description of Artificial Sequence: Synthetic oligonucleotide
aacaacagcattattccaga

SEQ ID NO: 152 - DNA, 20 bp, Artificial Sequence
  Description of Artificial Sequence: Synthetic oligonucleotide
tggaataatgctgttgttga

SEQ ID NO: 153 - DNA, 20 bp, Artificial Sequence
  Description of Artificial Sequence: Synthetic oligonucleotide
ttccagaagacaccttcttc

SEQ ID NO: 154 - DNA, 20 bp, Artificial Sequence
  Description of Artificial Sequence: Synthetic oligonucleotide
cagaagacaccttcttcccc

SEQ ID NO: 155 - DNA, 20 bp, Artificial Sequence
  Description of Artificial Sequence: Synthetic oligonucleotide
cctgggctggggaagaaggt

SEQ ID NO: 156 - DNA, 20 bp, Artificial Sequence
  Description of Artificial Sequence: Synthetic oligonucleotide
ttccccagcccaggtaaggg

SEQ ID NO: 157 - DNA, 20 bp, Artificial Sequence
  Description of Artificial Sequence: Synthetic oligonucleotide
cccagcccaggtaagggcag

SEQ ID NO: 158 - DNA, 20 bp, Artificial Sequence
  Description of Artificial Sequence: Synthetic oligonucleotide
taaaaggaaaaacagacatt

SEQ ID NO: 159 - DNA, 20 bp, Artificial Sequence
  Description of Artificial Sequence: Synthetic oligonucleotide
ctaaaaggaaaaacagacat

SEQ ID NO: 160 - DNA, 20 bp, Artificial Sequence
  Description of Artificial Sequence: Synthetic oligonucleotide
ttccttttagaaagttcctg

SEQ ID NO: 161 - DNA, 20 bp, Artificial Sequence
  Description of Artificial Sequence: Synthetic oligonucleotide
tccttttagaaagttcctgt

SEQ ID NO: 162 - DNA, 20 bp, Artificial Sequence
  Description of Artificial Sequence: Synthetic oligonucleotide
ccttttagaaagttcctgtg

SEQ ID NO: 163 - DNA, 20 bp, Artificial Sequence
  Description of Artificial Sequence: Synthetic oligonucleotide
cttttagaaagttcctgtga

SEQ ID NO: 164 - DNA, 20 bp, Artificial Sequence
  Description of Artificial Sequence: Synthetic oligonucleotide
tagaaagttcctgtgatgtc

SEQ ID NO: 165 - DNA, 20 bp, Artificial Sequence
  Description of Artificial Sequence: Synthetic oligonucleotide
agaaagttcctgtgatgtca

SEQ ID NO: 166 - DNA, 20 bp, Artificial Sequence
  Description of Artificial Sequence: Synthetic oligonucleotide
gaaagttcctgtgatgtcaa

SEQ ID NO: 167 - DNA, 20 bp, Artificial Sequence
  Description of Artificial Sequence: Synthetic oligonucleotide
acatcacaggaactttctaa

SEQ ID NO: 168 - DNA, 20 bp, Artificial Sequence
  Description of Artificial Sequence: Synthetic oligonucleotide
ctgtgatgtcaagctggtcg

SEQ ID NO: 169 - DNA, 20 bp, Artificial Sequence
  Description of Artificial Sequence: Synthetic oligonucleotide
tcgaccagcttgacatcaca

SEQ ID NO: 170 - DNA, 20 bp, Artificial Sequence
  Description of Artificial Sequence: Synthetic oligonucleotide
ctcgaccagcttgacatcac

SEQ ID NO: 171 - DNA, 20 bp, Artificial Sequence
  Description of Artificial Sequence: Synthetic oligonucleotide
tctcgaccagcttgacatca

SEQ ID NO: 172 - DNA, 20 bp, Artificial Sequence
  Description of Artificial Sequence: Synthetic oligonucleotide
aaagcttttctcgaccagct

SEQ ID NO: 173 - DNA, 20 bp, Artificial Sequence
  Description of Artificial Sequence: Synthetic oligonucleotide
caaagcttttctcgaccagc

SEQ ID NO: 174 - DNA, 20 bp, Artificial Sequence
  Description of Artificial Sequence: Synthetic oligonucleotide
cctgtttcaaagcttttctc

SEQ ID NO: 175 - DNA, 20 bp, Artificial Sequence
  Description of Artificial Sequence: Synthetic oligonucleotide
gaaacaggtaagacaggggt

SEQ ID NO: 176 - DNA, 20 bp, Artificial Sequence
  Description of Artificial Sequence: Synthetic oligonucleotide
aaacaggtaagacaggggtc

SEQ ID NO: 177 - DNA, 20 bp, Artificial Sequence
  Description of Artificial Sequence: Synthetic oligonucleotide
aatataagtggaggcgtcgc

SEQ ID NO: 178 - DNA, 20 bp, Artificial Sequence
  Description of Artificial Sequence: Synthetic oligonucleotide
atataagtggaggcgtcgcg

SEQ ID NO: 179 - DNA, 20 bp, Artificial Sequence
  Description of Artificial Sequence: Synthetic oligonucleotide
aggaatgcccgccagcgcga

SEQ ID NO: 180 - DNA, 20 bp, Artificial Sequence
  Description of Artificial Sequence: Synthetic oligonucleotide
ctgaagctgacagcattcgg

SEQ ID NO: 181 - DNA, 20 bp, Artificial Sequence
  Description of Artificial Sequence: Synthetic oligonucleotide
gggccgagatgtctcgctcc

SEQ ID NO: 182 - DNA, 20 bp, Artificial Sequence
  Description of Artificial Sequence: Synthetic oligonucleotide
gctgtgctcgcgctactctc

SEQ ID NO: 183 - DNA, 20 bp, Artificial Sequence
  Description of Artificial Sequence: Synthetic oligonucleotide
ctggcctggaggctatccag

SEQ ID NO: 184 - DNA, 20 bp, Artificial Sequence
  Description of Artificial Sequence: Synthetic oligonucleotide
tggcctggaggctatccagc

SEQ ID NO: 185 - DNA, 20 bp, Artificial Sequence
  Description of Artificial Sequence: Synthetic oligonucleotide
atgtgtcttttcccgatatt

SEQ ID NO: 186 - DNA, 20 bp, Artificial Sequence
  Description of Artificial Sequence: Synthetic oligonucleotide
tcccgatattcctcaggtac

SEQ ID NO: 187 - DNA, 20 bp, Artificial Sequence
  Description of Artificial Sequence: Synthetic oligonucleotide
cccgatattcctcaggtact

SEQ ID NO: 188 - DNA, 20 bp, Artificial Sequence
  Description of Artificial Sequence: Synthetic oligonucleotide
ccgatattcctcaggtactc

SEQ ID NO: 189 - DNA, 20 bp, Artificial Sequence
  Description of Artificial Sequence: Synthetic oligonucleotide
gagtacctgaggaatatcgg

SEQ ID NO: 190 - DNA, 20 bp, Artificial Sequence
  Description of Artificial Sequence: Synthetic oligonucleotide
ggagtacctgaggaatatcg

SEQ ID NO: 191 - DNA, 20 bp, Artificial Sequence
  Description of Artificial Sequence: Synthetic oligonucleotide
ctcaggtactccaaagattc

SEQ ID NO: 192 - DNA, 20 bp, Artificial Sequence
  Description of Artificial Sequence: Synthetic oligonucleotide
aggtttactcacgtcatcca

SEQ ID NO: 193 - DNA, 20 bp, Artificial Sequence
  Description of Artificial Sequence: Synthetic oligonucleotide
actcacgtcatccagcagag

SEQ ID NO: 194 - DNA, 20 bp, Artificial Sequence
  Description of Artificial Sequence: Synthetic oligonucleotide
ctcacgtcatccagcagaga

SEQ ID NO: 195 - DNA, 20 bp, Artificial Sequence
  Description of Artificial Sequence: Synthetic oligonucleotide
tctgctggatgacgtgagta

SEQ ID NO: 196 - DNA, 20 bp, Artificial Sequence
  Description of Artificial Sequence: Synthetic oligonucleotide
cattctctgctggatgacgt

SEQ ID NO: 197 - DNA, 20 bp, Artificial Sequence
  Description of Artificial Sequence: Synthetic oligonucleotide
ccattctctgctggatgacg

SEQ ID NO: 198 - DNA, 20 bp, Artificial Sequence
  Description of Artificial Sequence: Synthetic oligonucleotide
actttccattctctgctgga

SEQ ID NO: 199 - DNA, 20 bp, Artificial Sequence
  Description of Artificial Sequence: Synthetic oligonucleotide
gactttccattctctgctgg

SEQ ID NO: 200 - DNA, 20 bp, Artificial Sequence
  Description of Artificial Sequence: Synthetic oligonucleotide
aggaaatttgactttccatt

SEQ ID NO: 201 - DNA, 20 bp, Artificial Sequence
  Description of Artificial Sequence: Synthetic oligonucleotide
cctgaattgctatgtgtctg

SEQ ID NO: 202 - DNA, 20 bp, Artificial Sequence
  Description of Artificial Sequence: Synthetic oligonucleotide
ctgaattgctatgtgtctgg

SEQ ID NO: 203 - DNA, 20 bp, Artificial Sequence
  Description of Artificial Sequence: Synthetic oligonucleotide
ctatgtgtctgggtttcatc

SEQ ID NO: 204 - DNA, 20 bp, Artificial Sequence
  Description of Artificial Sequence: Synthetic oligonucleotide
aatgtcggatggatgaaacc

SEQ ID NO: 205 - DNA, 20 bp, Artificial Sequence
  Description of Artificial Sequence: Synthetic oligonucleotide
catccatccgacattgaagt

SEQ ID NO: 206 - DNA, 20 bp, Artificial Sequence
  Description of Artificial Sequence: Synthetic oligonucleotide
atccatccgacattgaagtt

SEQ ID NO: 207 - DNA, 20 bp, Artificial Sequence
  Description of Artificial Sequence: Synthetic oligonucleotide
agtaagtcaacttcaatgtc

SEQ ID NO: 208 - DNA, 20 bp, Artificial Sequence
  Description of Artificial Sequence: Synthetic oligonucleotide
ttcagtaagtcaacttcaat

SEQ ID NO: 209 - DNA, 20 bp, Artificial Sequence
  Description of Artificial Sequence: Synthetic oligonucleotide
aagttgacttactgaagaat

SEQ ID NO: 210 - DNA, 20 bp, Artificial Sequence
  Description of Artificial Sequence: Synthetic oligonucleotide
acttactgaagaatggagag

SEQ ID NO: 211 - DNA, 20 bp, Artificial Sequence
  Description of Artificial Sequence: Synthetic oligonucleotide
tctctccattcttcagtaag

SEQ ID NO: 212 - DNA, 20 bp, Artificial Sequence
  Description of Artificial Sequence: Synthetic oligonucleotide
ctgaagaatggagagagaat

SEQ ID NO: 213 - DNA, 20 bp, Artificial Sequence
  Description of Artificial Sequence: Synthetic oligonucleotide
aattctctctccattcttca

SEQ ID NO: 214 - DNA, 20 bp, Artificial Sequence
  Description of Artificial Sequence: Synthetic oligonucleotide
caattctctctccattcttc

SEQ ID NO: 215 - DNA, 20 bp, Artificial Sequence
  Description of Artificial Sequence: Synthetic oligonucleotide
tcaattctctctccattctt

SEQ ID NO: 216 - DNA, 20 bp, Artificial Sequence
  Description of Artificial Sequence: Synthetic oligonucleotide
ttcaattctctctccattct

SEQ ID NO: 217 - DNA, 20 bp, Artificial Sequence
  Description of Artificial Sequence: Synthetic oligonucleotide
aaaaagtggagcattcagac

SEQ ID NO: 218 - DNA, 20 bp, Artificial Sequence
  Description of Artificial Sequence: Synthetic oligonucleotide
ctgaaagacaagtctgaatg

SEQ ID NO: 219 - DNA, 20 bp, Artificial Sequence
  Description of Artificial Sequence: Synthetic oligonucleotide
agacttgtctttcagcaagg

SEQ ID NO: 220 - DNA, 20 bp, Artificial Sequence
  Description of Artificial Sequence: Synthetic oligonucleotide
tctttcagcaaggactggtc

SEQ ID NO: 221 - DNA, 20 bp, Artificial Sequence
  Description of Artificial Sequence: Synthetic oligonucleotide
cagcaaggactggtctttct

SEQ ID NO: 222 - DNA, 20 bp, Artificial Sequence
  Description of Artificial Sequence: Synthetic oligonucleotide
agcaaggactggtctttcta

SEQ ID NO: 223 - DNA, 20 bp, Artificial Sequence
  Description of Artificial Sequence: Synthetic oligonucleotide
ctatctcttgtactacactg

SEQ ID NO: 224 - DNA, 20 bp, Artificial Sequence
  Description of Artificial Sequence: Synthetic oligonucleotide
tatctcttgtactacactga

SEQ ID NO: 225 - DNA, 20 bp, Artificial Sequence
  Description of Artificial Sequence: Synthetic oligonucleotide
agtgtagtacaagagataga

SEQ ID NO: 226 - DNA, 20 bp, Artificial Sequence
  Description of Artificial Sequence: Synthetic oligonucleotide
tactacactgaattcacccc

SEQ ID NO: 227 - DNA, 20 bp, Artificial Sequence
  Description of Artificial Sequence: Synthetic oligonucleotide
agtgggggtgaattcagtgt

SEQ ID NO: 228 - DNA, 20 bp, Artificial Sequence
  Description of Artificial Sequence: Synthetic oligonucleotide
cagtgggggtgaattcagtg

SEQ ID NO: 229 - DNA, 20 bp, Artificial Sequence
  Description of Artificial Sequence: Synthetic oligonucleotide
tcagtgggggtgaattcagt

SEQ ID NO: 230 - DNA, 20 bp, Artificial Sequence
  Description of Artificial Sequence: Synthetic oligonucleotide
ttcagtgggggtgaattcag

SEQ ID NO: 231 - DNA, 20 bp, Artificial Sequence
  Description of Artificial Sequence: Synthetic oligonucleotide
acccccactgaaaaagatga

SEQ ID NO: 232 - DNA, 20 bp, Artificial Sequence
  Description of Artificial Sequence: Synthetic oligonucleotide
acacggcaggcatactcatc

SEQ ID NO: 233 - DNA, 20 bp, Artificial Sequence
  Description of Artificial Sequence: Synthetic oligonucleotide
ggctgtgacaaagtcacatg

SEQ ID NO: 234 - DNA, 20 bp, Artificial Sequence
  Description of Artificial Sequence: Synthetic oligonucleotide
gtcacagcccaagatagtta

SEQ ID NO: 235 - DNA, 20 bp, Artificial Sequence
  Description of Artificial Sequence: Synthetic oligonucleotide
tcacagcccaagatagttaa

SEQ ID NO: 236 - DNA, 20 bp, Artificial Sequence
  Description of Artificial Sequence: Synthetic oligonucleotide
actatcttgggctgtgacaa

SEQ ID NO: 237 - DNA, 20 bp, Artificial Sequence
  Description of Artificial Sequence: Synthetic oligonucleotide
ccccacttaactatcttggg

SEQ ID NO: 238 - RNA, 20 nt, Artificial Sequence
  Description of Artificial Sequence: Synthetic oligonucleotide
ccuuccgcucaccuccgccu

SEQ ID NO: 239 - RNA, 20 nt, Artificial Sequence
  Description of Artificial Sequence: Synthetic oligonucleotide
ccuuccgcucaccuccgccu

SEQ ID NO: 240 - RNA, 20 nt, Artificial Sequence
  Description of Artificial Sequence: Synthetic oligonucleotide
cgcucaccuccgccugagca

SEQ ID NO: 241 - RNA, 20 nt, Artificial Sequence
  Description of Artificial Sequence: Synthetic oligonucleotide
uccacugcucaggcggaggu

SEQ ID NO: 242 - RNA, 20 nt, Artificial Sequence
  Description of Artificial Sequence: Synthetic oligonucleotide
uagcaccgcccagacgacug

SEQ ID NO: 243 - RNA, 20 nt, Artificial Sequence
  Description of Artificial Sequence: Synthetic oligonucleotide
aggcaugcagaucccacagg

SEQ ID NO: 244 - RNA, 20 nt, Artificial Sequence
  Description of Artificial Sequence: Synthetic oligonucleotide
cacaggcgcccuggccaguc

SEQ ID NO: 245 - RNA, 20 nt, Artificial Sequence
  Description of Artificial Sequence: Synthetic oligonucleotide
ucugggcggugcuacaacug

SEQ ID NO: 246 - RNA, 20 nt, Artificial Sequence
  Description of Artificial Sequence: Synthetic oligonucleotide
gcaugccuggagcagcccca

SEQ ID NO: 247 - RNA, 20 nt, Artificial Sequence
  Description of Artificial Sequence: Synthetic oligonucleotide
uagcaccgcccagacgacug

SEQ ID NO: 248 - RNA, 20 nt, Artificial Sequence
  Description of Artificial Sequence: Synthetic oligonucleotide
uggccgccagcccaguugua

SEQ ID NO: 249 - RNA, 20 nt, Artificial Sequence
  Description of Artificial Sequence: Synthetic oligonucleotide
cuuccgcucaccuccgccug

SEQ ID NO: 250 - RNA, 20 nt, Artificial Sequence
  Description of Artificial Sequence: Synthetic oligonucleotide
cagggccugucuggggaguc

SEQ ID NO: 251 - RNA, 20 nt, Artificial Sequence
  Description of Artificial Sequence: Synthetic oligonucleotide
uccccagcccugcucguggu

SEQ ID NO: 252 - RNA, 20 nt, Artificial Sequence
  Description of Artificial Sequence: Synthetic oligonucleotide
ggucaccacgagcagggcug

SEQ ID NO: 253 - RNA, 20 nt, Artificial Sequence
  Description of Artificial Sequence: Synthetic oligonucleotide
uccccuucggucaccacgag

SEQ ID NO: 254 - RNA, 20 nt, Artificial Sequence
  Description of Artificial Sequence: Synthetic oligonucleotide
gagaagcugcaggugaaggu

SEQ ID NO: 255 - RNA, 20 nt, Artificial Sequence
  Description of Artificial Sequence: Synthetic oligonucleotide
accugcagcuucuccaacac

SEQ ID NO: 256 - RNA, 20 nt, Artificial Sequence
  Description of Artificial Sequence: Synthetic oligonucleotide
uccaacacaucggagagcuu

SEQ ID NO: 257 - RNA, 20 nt, Artificial Sequence
  Description of Artificial Sequence: Synthetic oligonucleotide
gcacgaagcucuccgaugug

SEQ ID NO: 258 - RNA, 20 nt, Artificial Sequence
  Description of Artificial Sequence: Synthetic oligonucleotide
agcacgaagcucuccgaugu

SEQ ID NO: 259 - RNA, 20 nt, Artificial Sequence
  Description of Artificial Sequence: Synthetic oligonucleotide
gugcuaaacugguaccgcau

SEQ ID NO: 260 - RNA, 20 nt, Artificial Sequence
  Description of Artificial Sequence: Synthetic oligonucleotide
cuggggcucaugcgguacca

SEQ ID NO: 261 - RNA, 20 nt, Artificial Sequence
  Description of Artificial Sequence: Synthetic oligonucleotide
uccgucugguugcuggggcu

SEQ ID NO: 262 - RNA, 20 nt, Artificial Sequence
  Description of Artificial Sequence: Synthetic oligonucleotide
cccgaggaccgcagccagcc

SEQ ID NO: 263 - RNA, 20 nt, Artificial Sequence
  Description of Artificial Sequence: Synthetic oligonucleotide
ugugacacggaagcggcagu

SEQ ID NO: 264 - RNA, 20 nt, Artificial Sequence
  Description of Artificial Sequence: Synthetic oligonucleotide
cgugucacacaacugcccaa

SEQ ID NO: 265 - RNA, 20 nt, Artificial Sequence
  Description of Artificial Sequence: Synthetic oligonucleotide
ggcaguugugugacacggaa

SEQ ID NO: 266 - RNA, 20 nt, Artificial Sequence
  Description of Artificial Sequence: Synthetic oligonucleotide
cacaugagcguggucagggc

SEQ ID NO: 267 - RNA, 20 nt, Artificial Sequence
  Description of Artificial Sequence: Synthetic oligonucleotide
cgccgggcccugaccacgcu

SEQ ID NO: 268 - RNA, 20 nt, Artificial Sequence
  Description of Artificial Sequence: Synthetic oligonucleotide
ggggccagggagauggcccc

SEQ ID NO: 269 - RNA, 20 nt, Artificial Sequence
  Description of Artificial Sequence: Synthetic oligonucleotide
aucugcgccuugggggccag

SEQ ID NO: 270 - RNA, 20 nt, Artificial Sequence
  Description of Artificial Sequence: Synthetic oligonucleotide
gaucugcgccuugggggcca

SEQ ID NO: 271 - RNA, 20 nt, Artificial Sequence
  Description of Artificial Sequence: Synthetic oligonucleotide
ccagacaggcccuggaaccc

SEQ ID NO: 272 - RNA, 20 nt, Artificial Sequence
  Description of Artificial Sequence: Synthetic oligonucleotide
ccagcccugcucguggugac

SEQ ID NO: 273 - RNA, 20 nt, Artificial Sequence
  Description of Artificial Sequence: Synthetic oligonucleotide
ucucuggaagggcacaaagg

SEQ ID NO: 274 - RNA, 20 nt, Artificial Sequence
  Description of Artificial Sequence: Synthetic oligonucleotide
gugcccuuccagagagaagg

SEQ ID NO: 275 - RNA, 20 nt, Artificial Sequence
  Description of Artificial Sequence: Synthetic oligonucleotide
ugcccuuccagagagaaggg

SEQ ID NO: 276 - RNA, 20 nt, Artificial Sequence
  Description of Artificial Sequence: Synthetic oligonucleotide
ugcccuucucucuggaaggg

SEQ ID NO: 277 - RNA, 20 nt, Artificial Sequence
  Description of Artificial Sequence: Synthetic oligonucleotide
cagagagaagggcagaagug

SEQ ID NO: 278 - RNA, 20 nt, Artificial Sequence
  Description of Artificial Sequence: Synthetic oligonucleotide
gaacuggccggcuggccugg

SEQ ID NO: 279 - RNA, 20 nt, Artificial Sequence
  Description of Artificial Sequence: Synthetic oligonucleotide
ggaacuggccggcuggccug

SEQ ID NO: 280 - RNA, 20 nt, Artificial Sequence
  Description of Artificial Sequence: Synthetic oligonucleotide
caaacccuggugguuggugu

SEQ ID NO: 281 - RNA, 20 nt, Artificial Sequence
  Description of Artificial Sequence: Synthetic oligonucleotide
gugucgugggcggccugcug

SEQ ID NO: 282 - RNA, 20 nt, Artificial Sequence
  Description of Artificial Sequence: Synthetic oligonucleotide
ccucgugcggcccgggagca

SEQ ID NO: 283 - RNA, 20 nt, Artificial Sequence
  Description of Artificial Sequence: Synthetic oligonucleotide
ucccugcagagaaacacacu

SEQ ID NO: 284 - RNA, 20 nt, Artificial Sequence
  Description of Artificial Sequence: Synthetic oligonucleotide
cucugcagggacaauaggag

SEQ ID NO: 285 - RNA, 20 nt, Artificial Sequence
  Description of Artificial Sequence: Synthetic oligonucleotide
ucugcagggacaauaggagc

SEQ ID NO: 286 - RNA, 20 nt, Artificial Sequence
  Description of Artificial Sequence: Synthetic oligonucleotide
cuccucaaagaaggaggacc

SEQ ID NO: 287 - RNA, 20 nt, Artificial Sequence
  Description of Artificial Sequence: Synthetic oligonucleotide
uccucaaagaaggaggaccc

SEQ ID NO: 288 - RNA, 20 nt, Artificial Sequence
  Description of Artificial Sequence: Synthetic oligonucleotide
ucuguggacuauggggagcu

SEQ ID NO: 289 - RNA, 20 nt, Artificial Sequence
  Description of Artificial Sequence: Synthetic oligonucleotide
ucucgccacuggaaauccag

SEQ ID NO: 290 - RNA, 20 nt, Artificial Sequence
  Description of Artificial Sequence: Synthetic oligonucleotide
ccaguggcgagagaagaccc

SEQ ID NO: 291 - RNA, 20 nt, Artificial Sequence
  Description of Artificial Sequence: Synthetic oligonucleotide
caguggcgagagaagacccc

SEQ ID NO: 292 - RNA, 20 nt, Artificial Sequence
  Description of Artificial Sequence: Synthetic oligonucleotide
cgcuaggaaagacaauggug

SEQ ID NO: 293 - RNA, 20 nt, Artificial Sequence
  Description of Artificial Sequence: Synthetic oligonucleotide
ucuuuccuagcggaaugggc

SEQ ID NO: 294 - RNA, 20 nt, Artificial Sequence
  Description of Artificial Sequence: Synthetic oligonucleotide
ccuagcggaaugggcaccuc

SEQ ID NO: 295 - RNA, 20 nt, Artificial Sequence
  Description of Artificial Sequence: Synthetic oligonucleotide
cuagcggaaugggcaccuca

SEQ ID NO: 296 - RNA, 20 nt, Artificial Sequence
  Description of Artificial Sequence: Synthetic oligonucleotide
gccccucugaccggcuuccu

SEQ ID NO: 297 - RNA, 20 nt, Artificial Sequence
  Description of Artificial Sequence: Synthetic oligonucleotide
cuuggccaccaguguucugc

SEQ ID NO: 298 - RNA, 20 nt, Artificial Sequence
  Description of Artificial Sequence: Synthetic oligonucleotide
gccaccaguguucugcagac

SEQ ID NO: 299 - RNA, 20 nt, Artificial Sequence
  Description of Artificial Sequence: Synthetic oligonucleotide
ugcagacccuccaccaugag

SEQ ID NO: 300 - RNA, 20 nt, Artificial Sequence
  Description of Artificial Sequence: Synthetic oligonucleotide
uccugaggaaaugcgcugac

SEQ ID NO: 301 - RNA, 20 nt, Artificial Sequence
  Description of Artificial Sequence: Synthetic oligonucleotide
ccucaggagaagcaggcagg

SEQ ID NO: 302 - RNA, 20 nt, Artificial Sequence
  Description of Artificial Sequence: Synthetic oligonucleotide
cucaggagaagcaggcaggg

SEQ ID NO: 303 - RNA, 20 nt, Artificial Sequence
  Description of Artificial Sequence: Synthetic oligonucleotide
caggccguccaggggcugag

SEQ ID NO: 304 - RNA, 20 nt, Artificial Sequence
  Description of Artificial Sequence: Synthetic oligonucleotide
agacaugaguccuguggugg

SEQ ID NO: 305 - RNA, 20 nt, Artificial Sequence
  Description of Artificial Sequence: Synthetic oligonucleotide
agguccugccagcacagagc

SEQ ID NO: 306 - RNA, 20 nt, Artificial Sequence
  Description of Artificial Sequence: Synthetic oligonucleotide
agggagcuggacgcaggcag

SEQ ID NO: 307 - RNA, 20 nt, Artificial Sequence
  Description of Artificial Sequence: Synthetic oligonucleotide
agccccgggccgcaggcagc

SEQ ID NO: 308 - RNA, 20 nt, Artificial Sequence
  Description of Artificial Sequence: Synthetic oligonucleotide
aggcaggaggcuccggggcg

SEQ ID NO: 309 - RNA, 20 nt, Artificial Sequence
  Description of Artificial Sequence: Synthetic oligonucleotide
ggggcugguuggagauggcc

SEQ ID NO: 310 - RNA, 20 nt, Artificial Sequence
  Description of Artificial Sequence: Synthetic oligonucleotide
gagauggccuuggagcagcc

SEQ ID NO: 311 - RNA, 20 nt, Artificial Sequence
  Description of Artificial Sequence: Synthetic oligonucleotide
gcugcuccaaggccaucucc

SEQ ID NO: 312 - RNA, 20 nt, Artificial Sequence
  Description of Artificial Sequence: Synthetic oligonucleotide
gagcagccaaggugccccug

SEQ ID NO: 313 - RNA, 20 nt, Artificial Sequence
  Description of Artificial Sequence: Synthetic oligonucleotide
gggaugccacugccaggggc

SEQ ID NO: 314 - RNA, 20 nt, Artificial Sequence
  Description of Artificial Sequence: Synthetic oligonucleotide
cgggaugccacugccagggg

SEQ ID NO: 315 - RNA, 20 nt, Artificial Sequence
  Description of Artificial Sequence: Synthetic oligonucleotide
ggcccugcguccagggcguu

SEQ ID NO: 316 - RNA, 20 nt, Artificial Sequence
  Description of Artificial Sequence: Synthetic oligonucleotide
ucugcucccugcaggccuag

SEQ ID NO: 317 - RNA, 20 nt, Artificial Sequence
  Description of Artificial Sequence: Synthetic oligonucleotide
ucuaggccugcagggagcag

SEQ ID NO: 318 - RNA, 20 nt, Artificial Sequence
  Description of Artificial Sequence: Synthetic oligonucleotide
ccugaaacuucucuaggccu

SEQ ID NO: 319 - RNA, 20 nt, Artificial Sequence
  Description of Artificial Sequence: Synthetic oligonucleotide
ugaccuucccugaaacuucu

SEQ ID NO: 320 - RNA, 20 nt, Artificial Sequence
  Description of Artificial Sequence: Synthetic oligonucleotide
cagggaaggucagaagagcu

SEQ ID NO: 321 - RNA, 20 nt, Artificial Sequence
  Description of Artificial Sequence: Synthetic oligonucleotide
agggaaggucagaagagcuc

SEQ ID NO: 322 - RNA, 20 nt, Artificial Sequence
  Description of Artificial Sequence: Synthetic oligonucleotide
cugcccugcccaccacagcc

SEQ ID NO: 323 - RNA, 20 nt, Artificial Sequence
  Description of Artificial Sequence: Synthetic oligonucleotide
ccugcccugcccaccacagc

SEQ ID NO: 324 - RNA, 20 nt, Artificial Sequence
  Description of Artificial Sequence: Synthetic oligonucleotide
acacaugcccaggcagcacc

SEQ ID NO: 325 - RNA, 20 nt, Artificial Sequence
  Description of Artificial Sequence: Synthetic oligonucleotide
cacaugcccaggcagcaccu

SEQ ID NO: 326 - RNA, 20 nt, Artificial Sequence
  Description of Artificial Sequence: Synthetic oligonucleotide
ccugccccacaaagggccug

SEQ ID NO: 327 - RNA, 20 nt, Artificial Sequence
  Description of Artificial Sequence: Synthetic oligonucleotide
guggggcagggaagcugagg

SEQ ID NO: 328 - RNA, 20 nt, Artificial Sequence
  Description of Artificial Sequence: Synthetic oligonucleotide
uggggcagggaagcugaggc

SEQ ID NO: 329 - RNA, 20 nt, Artificial Sequence
  Description of Artificial Sequence: Synthetic oligonucleotide
cugccucagcuucccugccc

SEQ ID NO: 330 - RNA, 20 nt, Artificial Sequence
  Description of Artificial Sequence: Synthetic oligonucleotide
caggcccagccagcacucug

SEQ ID NO: 331 - RNA, 20 nt, Artificial Sequence
  Description of Artificial Sequence: Synthetic oligonucleotide
aggcccagccagcacucugg

SEQ ID NO: 332 - RNA, 20 nt, Artificial Sequence
  Description of Artificial Sequence: Synthetic oligonucleotide
caccccagccccucacacca

SEQ ID NO: 333 - RNA, 20 nt, Artificial Sequence
  Description of Artificial Sequence: Synthetic oligonucleotide
ggaccguaggaugucccucu

SEQ ID NO: 334 - DNA, 20 bp, Artificial Sequence
  Description of Artificial Sequence: Synthetic oligonucleotide
ctacacaatgcgttgcctgg

SEQ ID NO: 335 - DNA, 20 bp, Artificial Sequence
  Description of Artificial Sequence: Synthetic oligonucleotide
gggctctgacaggtaggacc

SEQ ID NO: 336 - DNA, 20 bp, Artificial Sequence
  Description of Artificial Sequence: Synthetic oligonucleotide
tgtaggaatcccagccaggc

SEQ ID NO: 337 - DNA, 20 bp, Artificial Sequence
  Description of Artificial Sequence: Synthetic oligonucleotide
cctggctccacgccctgctg

SEQ ID NO: 338 - DNA, 20 bp, Artificial Sequence
  Description of Artificial Sequence: Synthetic oligonucleotide
gggaagctgagggcacgagg

SEQ ID NO: 339 - DNA, 20 bp, Artificial Sequence
  Description of Artificial Sequence: Synthetic oligonucleotide
acagcgatgctgaccccctg

SEQ ID NO: 340 - DNA, 20 bp, Artificial Sequence
  Description of Artificial Sequence: Synthetic oligonucleotide
ttaacagcgatgctgacccc

SEQ ID NO: 341 - DNA, 20 bp, Artificial Sequence
  Description of Artificial Sequence: Synthetic oligonucleotide
tatgaccagatggacctggc

SEQ ID NO: 342 - DNA, 20 bp, Artificial Sequence
  Description of Artificial Sequence: Synthetic oligonucleotide
gggcccctagaaggtggcta

SEQ ID NO: 343 - DNA, 20 bp, Artificial Sequence
  Description of Artificial Sequence: Synthetic oligonucleotide
taggggccccaactccatgg

SEQ ID NO: 344 - DNA, 20 bp, Artificial Sequence
  Description of Artificial Sequence: Synthetic oligonucleotide
agaagctccaggtagccacc

SEQ ID NO: 345 - DNA, 20 bp, Artificial Sequence
  Description of Artificial Sequence: Synthetic oligonucleotide
tccagccaggtccatctggt

SEQ ID NO: 346 - DNA, 20 bp, Artificial Sequence
  Description of Artificial Sequence: Synthetic oligonucleotide
ttctccagccaggtccatct

SEQ ID NO: 347 - RNA, 20 nt, Artificial Sequence
  Description of Artificial Sequence: Synthetic oligonucleotide
ccgcuguugccgccgcugcu

SEQ ID NO: 348 - RNA, 20 nt, Artificial Sequence
  Description of Artificial Sequence: Synthetic oligonucleotide
ccgccgcugcugcugcuguu

SEQ ID NO: 349 - RNA, 20 nt, Artificial Sequence
  Description of Artificial Sequence: Synthetic oligonucleotide
cugcuacugugccccaccgg

SEQ ID NO: 350 - RNA, 20 nt, Artificial Sequence
  Description of Artificial Sequence: Synthetic oligonucleotide
auaaucuccauccucguccu

SEQ ID NO: 351 - RNA, 20 nt, Artificial Sequence
  Description of Artificial Sequence: Synthetic oligonucleotide
ugaagagcugaugcucgccc

SEQ ID NO: 352 - RNA, 20 nt, Artificial Sequence
  Description of Artificial Sequence: Synthetic oligonucleotide
gagcaacggcggaagguggc

SEQ ID NO: 353 - RNA, 20 nt, Artificial Sequence
  Description of Artificial Sequence: Synthetic oligonucleotide
cuggcagccuccaggccucc

SEQ ID NO: 354 - RNA, 20 nt, Artificial Sequence
  Description of Artificial Sequence: Synthetic oligonucleotide
uggugcugauggaggagacc

SEQ ID NO: 355 - RNA, 20 nt, Artificial Sequence
  Description of Artificial Sequence: Synthetic oligonucleotide
aaucuguagccucugggucu

SEQ ID NO: 356 - RNA, 20 nt, Artificial Sequence
  Description of Artificial Sequence: Synthetic oligonucleotide
uucaaucuguagccucuggg

SEQ ID NO: 357 - RNA, 20 nt, Artificial Sequence
  Description of Artificial Sequence: Synthetic oligonucleotide
guucaaucuguagccucugg

SEQ ID NO: 358 - RNA, 20 nt, Artificial Sequence
  Description of Artificial Sequence: Synthetic oligonucleotide
aacaaacugcccaccgccug

SEQ ID NO: 359 - RNA, 20 nt, Artificial Sequence
  Description of Artificial Sequence: Synthetic oligonucleotide
augacauagccccggcgggc

SEQ ID NO: 360 - RNA, 20 nt, Artificial Sequence
  Description of Artificial Sequence: Synthetic oligonucleotide
uacauaucuuuuaugaccuc

SEQ ID NO: 361 - RNA, 20 nt, Artificial Sequence
  Description of Artificial Sequence: Synthetic oligonucleotide
uaugaccucuucccuggcuu

SEQ ID NO: 362 - RNA, 20 nt, Artificial Sequence
  Description of Artificial Sequence: Synthetic oligonucleotide
augaccucuucccuggcuuc

SEQ ID NO: 363 - RNA, 20 nt, Artificial Sequence
  Description of Artificial Sequence: Synthetic oligonucleotide
ugaccucuucccuggcuucu

SEQ ID NO: 364 - RNA, 20 nt, Artificial Sequence
  Description of Artificial Sequence: Synthetic oligonucleotide
accaagaagccagggaagag

SEQ ID NO: 365 - RNA, 20 nt, Artificial Sequence
  Description of Artificial Sequence: Synthetic oligonucleotide
ccuggcuucuuggugaagau

SEQ ID NO: 366 - RNA, 20 nt, Artificial Sequence
  Description of Artificial Sequence: Synthetic oligonucleotide
uuggugaagaugagcaguga

SEQ ID NO: 367 - RNA, 20 nt, Artificial Sequence
  Description of Artificial Sequence: Synthetic oligonucleotide
gugaagaugagcagugaccu

SEQ ID NO: 368 - RNA, 20 nt, Artificial Sequence
  Description of Artificial Sequence: Synthetic oligonucleotide
ccccauguggaguacauuga

SEQ ID NO: 369 - RNA, 20 nt, Artificial Sequence
  Description of Artificial Sequence: Synthetic oligonucleotide
cucaauguacuccacauggg

SEQ ID NO: 370 - RNA, 20 nt, Artificial Sequence
  Description of Artificial Sequence: Synthetic oligonucleotide
aggaagacuccuuugucuuc

SEQ ID NO: 371 - RNA, 20 nt, Artificial Sequence
  Description of Artificial Sequence: Synthetic oligonucleotide
gucuucgcccagagcauccc

SEQ ID NO: 372 - RNA, 20 nt, Artificial Sequence
  Description of Artificial Sequence: Synthetic oligonucleotide
ucuucgcccagagcauccca

SEQ ID NO: 373 - RNA, 20 nt, Artificial Sequence
  Description of Artificial Sequence: Synthetic oligonucleotide
gcccagagcaucccauggaa

SEQ ID NO: 374 - RNA, 20 nt, Artificial Sequence
  Description of Artificial Sequence: Synthetic oligonucleotide
caugggaugcucugggcgaa

SEQ ID NO: 375 - RNA, 20 nt, Artificial Sequence
  Description of Artificial Sequence: Synthetic oligonucleotide
gcuccagguuccaugggaug

SEQ ID NO: 376 - RNA, 20 nt, Artificial Sequence
  Description of Artificial Sequence: Synthetic oligonucleotide
ucccagcauggcaccagaca

SEQ ID NO: 377 - RNA, 20 nt, Artificial Sequence
  Description of Artificial Sequence: Synthetic oligonucleotide
cucugucuggugccaugcug

SEQ ID NO: 378 - RNA, 20 nt, Artificial Sequence
  Description of Artificial Sequence: Synthetic oligonucleotide
gauaccagcauccagggugc

SEQ ID NO: 379 - RNA, 20 nt, Artificial Sequence
  Description of Artificial Sequence: Synthetic oligonucleotide
agggcagggucaccaucacc

SEQ ID NO: 380 - RNA, 20 nt, Artificial Sequence
  Description of Artificial Sequence: Synthetic oligonucleotide
aagucggugauggugacccu

SEQ ID NO: 381 - RNA, 20 nt, Artificial Sequence
  Description of Artificial Sequence: Synthetic oligonucleotide
aacagcgugccggaggagga

SEQ ID NO: 382 - RNA, 20 nt, Artificial Sequence
  Description of Artificial Sequence: Synthetic oligonucleotide
gccacaccagcaucccggcc

SEQ ID NO: 383 - RNA, 20 nt, Artificial Sequence
  Description of Artificial Sequence: Synthetic oligonucleotide
agcacacgcaggcugugcag

SEQ ID NO: 384 - RNA, 20 nt, Artificial Sequence
  Description of Artificial Sequence: Synthetic oligonucleotide
acaguugagcacacgcaggc

SEQ ID NO: 385 - RNA, 20 nt, Artificial Sequence
  Description of Artificial Sequence: Synthetic oligonucleotide
ccuugacaguugagcacacg

SEQ ID NO: 386 - RNA, 20 nt, Artificial Sequence
  Description of Artificial Sequence: Synthetic oligonucleotide
gcugacucuuccgaauaaac

SEQ ID NO: 387 - RNA, 20 nt, Artificial Sequence
  Description of Artificial Sequence: Synthetic oligonucleotide
auucggaagagucagcuaau

SEQ ID NO: 388 - RNA, 20 nt, Artificial Sequence
  Description of Artificial Sequence: Synthetic oligonucleotide
uucggaagagucagcuaauc

SEQ ID NO: 389 - RNA, 20 nt, Artificial Sequence
  Description of Artificial Sequence: Synthetic oligonucleotide
ggaagagucagcuaauccag

SEQ ID NO: 390 - RNA, 20 nt, Artificial Sequence
  Description of Artificial Sequence: Synthetic oligonucleotide
ugcugccccuggccgguggg

SEQ ID NO: 391 - RNA, 20 nt, Artificial Sequence
  Description of Artificial Sequence: Synthetic oligonucleotide
aggaugcggcuauacccacc

SEQ ID NO: 392 - RNA, 20 nt, Artificial Sequence
  Description of Artificial Sequence: Synthetic oligonucleotide
ccagcugcugcaaccagcac

SEQ ID NO: 393 - RNA, 20 nt, Artificial Sequence
  Description of Artificial Sequence: Synthetic oligonucleotide
cagcagcugggaacuuccgg

SEQ ID NO: 394 - RNA, 20 nt, Artificial Sequence
  Description of Artificial Sequence: Synthetic oligonucleotide
cgggacgacgccugccucua

SEQ ID NO: 395 - RNA, 20 nt, Artificial Sequence
  Description of Artificial Sequence: Synthetic oligonucleotide
guggccccgacugugaugac

SEQ ID NO: 396 - RNA, 20 nt, Artificial Sequence
  Description of Artificial Sequence: Synthetic oligonucleotide
ccuuggggacuuuggggacu

SEQ ID NO: 397 - RNA, 20 nt, Artificial Sequence
  Description of Artificial Sequence: Synthetic oligonucleotide
guccccaaaguccccaaggu

SEQ ID NO: 398 - RNA, 20 nt, Artificial Sequence
  Description of Artificial Sequence: Synthetic oligonucleotide
gggacuuuggggacuaauuu

SEQ ID NO: 399 - RNA, 20 nt, Artificial Sequence
  Description of Artificial Sequence: Synthetic oligonucleotide
ggggacuaauuuuggacgcu

SEQ ID NO: 400 - RNA, 20 nt, Artificial Sequence
  Description of Artificial Sequence: Synthetic oligonucleotide
gggacuaauuuuggacgcug

SEQ ID NO: 401 - RNA, 20 nt, Artificial Sequence
  Description of Artificial Sequence: Synthetic oligonucleotide
uggacgcuguguggaucucu

SEQ ID NO: 402 - RNA, 20 nt, Artificial Sequence
  Description of Artificial Sequence: Synthetic oligonucleotide
ggacgcuguguggaucucuu

SEQ ID NO: 403 - RNA, 20 nt, Artificial Sequence
  Description of Artificial Sequence: Synthetic oligonucleotide
gacgcuguguggaucucuuu

SEQ ID NO: 404 - RNA, 20 nt, Artificial Sequence
  Description of Artificial Sequence: Synthetic oligonucleotide
ccgggggcaaagagauccac

SEQ ID NO: 405 - RNA, 20 nt, Artificial Sequence
  Description of Artificial Sequence: Synthetic oligonucleotide
gcccccgggaaggacaucau

SEQ ID NO: 406 - RNA, 20 nt, Artificial Sequence
  Description of Artificial Sequence: Synthetic oligonucleotide
cccccgggaaggacaucauc

SEQ ID NO: 407 - RNA, 20 nt, Artificial Sequence
  Description of Artificial Sequence: Synthetic oligonucleotide
augucacagagugggaccuc

SEQ ID NO: 408 - RNA, 20 nt, Artificial Sequence
  Description of Artificial Sequence: Synthetic oligonucleotide
uggcucggaugcugagccgg

SEQ ID NO: 409 - RNA, 20 nt, Artificial Sequence
  Description of Artificial Sequence: Synthetic oligonucleotide
cccuggccgagcugcggcag

SEQ ID NO: 410 - RNA, 20 nt, Artificial Sequence
  Description of Artificial Sequence: Synthetic oligonucleotide
guagagaaguggaucagccu

SEQ ID NO: 411 - RNA, 20 nt, Artificial Sequence
  Description of Artificial Sequence: Synthetic oligonucleotide
gguagagaaguggaucagcc

SEQ ID NO: 412 - RNA, 20 nt, Artificial Sequence
  Description of Artificial Sequence: Synthetic oligonucleotide
ucuaccaaagacgucaucaa

SEQ ID NO: 413 - RNA, 20 nt, Artificial Sequence
  Description of Artificial Sequence: Synthetic oligonucleotide
augacgucuuugguagagaa

SEQ ID NO: 414 - RNA, 20 nt, Artificial Sequence
  Description of Artificial Sequence: Synthetic oligonucleotide
ccugaggaccagcaggugcu

SEQ ID NO: 415 - RNA, 20 nt, Artificial Sequence
  Description of Artificial Sequence: Synthetic oligonucleotide
ggggucagcaccugcugguc

SEQ ID NO: 416 - RNA, 20 nt, Artificial Sequence
  Description of Artificial Sequence: Synthetic oligonucleotide
gagugggccccgagugugcc

SEQ ID NO: 417 - RNA, 20 nt, Artificial Sequence
  Description of Artificial Sequence: Synthetic oligonucleotide
uggggcacagcgggcuguag

SEQ ID NO: 418 - RNA, 20 nt, Artificial Sequence
  Description of Artificial Sequence: Synthetic oligonucleotide
uccaggagcgggaggcgucg

SEQ ID NO: 419 - RNA, 20 nt, Artificial Sequence
  Description of Artificial Sequence: Synthetic oligonucleotide
cagaccugcuggccuccuau

SEQ ID NO: 420 - RNA, 20 nt, Artificial Sequence
  Description of Artificial Sequence: Synthetic oligonucleotide
agggccuugcagaccugcug

SEQ ID NO: 421 - RNA, 20 nt, Artificial Sequence
  Description of Artificial Sequence: Synthetic oligonucleotide
gggggugagggugucuaugc

SEQ ID NO: 422 - RNA, 20 nt, Artificial Sequence
  Description of Artificial Sequence: Synthetic oligonucleotide
ggggugagggugucuaugcc

SEQ ID NO: 423 - RNA, 20 nt, Artificial Sequence
  Description of Artificial Sequence: Synthetic oligonucleotide
gcacggggaaccaggcagca

SEQ ID NO: 424 - RNA, 20 nt, Artificial Sequence
  Description of Artificial Sequence: Synthetic oligonucleotide
cccgugccaacugcagcauc

SEQ ID NO: 425 - RNA, 20 nt, Artificial Sequence
  Description of Artificial Sequence: Synthetic oligonucleotide
uggaugcugcaguuggcacg

SEQ ID NO: 426 - RNA, 20 nt, Artificial Sequence
  Description of Artificial Sequence: Synthetic oligonucleotide
ugguggcaguggacaugggu

SEQ ID NO: 427 - RNA, 20 nt, Artificial Sequence
  Description of Artificial Sequence: Synthetic oligonucleotide
cacuucccaauggaagcugc

SEQ ID NO: 428 - RNA, 20 nt, Artificial Sequence
  Description of Artificial Sequence: Synthetic oligonucleotide
cauugggaaguggaagaccu

SEQ ID NO: 429 - RNA, 20 nt, Artificial Sequence
  Description of Artificial Sequence: Synthetic oligonucleotide
ggaaguggaagaccuuagug

SEQ ID NO: 430 - RNA, 20 nt, Artificial Sequence
  Description of Artificial Sequence: Synthetic oligonucleotide
guguccggaggcagccugcg

SEQ ID NO: 431 - RNA, 20 nt, Artificial Sequence
  Description of Artificial Sequence: Synthetic oligonucleotide
gccaccaggcggccaguguc

SEQ ID NO: 432 - RNA, 20 nt, Artificial Sequence
  Description of Artificial Sequence: Synthetic oligonucleotide
cugcugccaugccccagggc

SEQ ID NO: 433 - RNA, 20 nt, Artificial Sequence
  Description of Artificial Sequence: Synthetic oligonucleotide
cagcccuggggcauggcagc

SEQ ID NO: 434 - RNA, 20 nt, Artificial Sequence
  Description of Artificial Sequence: Synthetic oligonucleotide
cauuccagcccuggggcaug

SEQ ID NO: 435 - RNA, 20 nt, Artificial Sequence
  Description of Artificial Sequence: Synthetic oligonucleotide
gcauuccagcccuggggcau

SEQ ID NO: 436 - RNA, 20 nt, Artificial Sequence
  Description of Artificial Sequence: Synthetic oligonucleotide
ugcauuccagcccuggggca

SEQ ID NO: 437 - RNA, 20 nt, Artificial Sequence
  Description of Artificial Sequence: Synthetic oligonucleotide
auuuugcauuccagcccugg

SEQ ID NO: 438 - RNA, 20 nt, Artificial Sequence
  Description of Artificial Sequence: Synthetic oligonucleotide
cauccagucaggguccaucc

SEQ ID NO: 439 - RNA, 20 nt, Artificial Sequence
  Description of Artificial Sequence: Synthetic oligonucleotide
uccacgcuguaggcucccag

SEQ ID NO: 440 - RNA, 20 nt, Artificial Sequence
  Description of Artificial Sequence: Synthetic oligonucleotide
ccacacacagguuguccacg

SEQ ID NO: 441 - RNA, 20 nt, Artificial Sequence
  Description of Artificial Sequence: Synthetic oligonucleotide
uccacugguccugucugcuc

SEQ ID NO: 442 - RNA, 20 nt, Artificial Sequence
  Description of Artificial Sequence: Synthetic oligonucleotide
cugaaggccggcuccggcag

SEQ ID NO: 443 - DNA, 20 bp, Artificial Sequence
  Description of Artificial Sequence: Synthetic oligonucleotide
gaagctatgttttccatctc

SEQ ID NO: 444 - DNA, 20 bp, Artificial Sequence
  Description of Artificial Sequence: Synthetic oligonucleotide
gcaggggcagccgccccctg

SEQ ID NO: 445 - DNA, 20 bp, Artificial Sequence
  Description of Artificial Sequence: Synthetic oligonucleotide
ctcctagaacccaacaggta

SEQ ID NO: 446 - DNA, 20 bp, Artificial Sequence
  Description of Artificial Sequence: Synthetic oligonucleotide
gaaagacctcctctgtgtcc

SEQ ID NO: 447 - DNA, 20 bp, Artificial Sequence
  Description of Artificial Sequence: Synthetic oligonucleotide
tccatctcggggttggcagg

SEQ ID NO: 448 - DNA, 20 bp, Artificial Sequence
  Description of Artificial Sequence: Synthetic oligonucleotide
ttcctgatggtggagatgga

SEQ ID NO: 449 - DNA, 20 bp, Artificial Sequence
  Description of Artificial Sequence: Synthetic oligonucleotide
ctgactcccagctctgaccc

SEQ ID NO: 450 - DNA, 20 bp, Artificial Sequence
  Description of Artificial Sequence: Synthetic oligonucleotide
tggggtcagagctgggagtc

SEQ ID NO: 451 - DNA, 20 bp, Artificial Sequence
  Description of Artificial Sequence: Synthetic oligonucleotide
gaaagacctcctctgtgtcc

SEQ ID NO: 452 - DNA, 20 bp, Artificial Sequence
  Description of Artificial Sequence: Synthetic oligonucleotide
cgaagctatgttttccatct

SEQ ID NO: 453 - DNA, 20 bp, Artificial Sequence
  Description of Artificial Sequence: Synthetic oligonucleotide
gaagctatgttttccatctc

SEQ ID NO: 454 - DNA, 20 bp, Artificial Sequence
  Description of Artificial Sequence: Synthetic oligonucleotide
tccatctccaccatcaggaa

SEQ ID NO: 455 - DNA, 20 bp, Artificial Sequence
  Description of Artificial Sequence: Synthetic oligonucleotide
ccatctccaccatcaggaac

SEQ ID NO: 456 - DNA, 20 bp, Artificial Sequence
  Description of Artificial Sequence: Synthetic oligonucleotide
ctgatggtggagatggaaaa

SEQ ID NO: 457 - DNA, 20 bp, Artificial Sequence
  Description of Artificial Sequence: Synthetic oligonucleotide
catctccaccatcaggaaca

SEQ ID NO: 458 - DNA, 20 bp, Artificial Sequence
  Description of Artificial Sequence: Synthetic oligonucleotide
ttcctgatggtggagatgga

SEQ ID NO: 459 - DNA, 20 bp, Artificial Sequence
  Description of Artificial Sequence: Synthetic oligonucleotide
gcaggggcagccgccccctg

SEQ ID NO: 460 - DNA, 20 bp, Artificial Sequence
  Description of Artificial Sequence: Synthetic oligonucleotide
tccatctcggggttggcagg

SEQ ID NO: 461 - DNA, 20 bp, Artificial Sequence
  Description of Artificial Sequence: Synthetic oligonucleotide
taggagcaaattgtccatct

SEQ ID NO: 462 - DNA, 20 bp, Artificial Sequence
  Description of Artificial Sequence: Synthetic oligonucleotide
ggttctaggagcaaattgtc

SEQ ID NO: 463 - DNA, 20 bp, Artificial Sequence
  Description of Artificial Sequence: Synthetic oligonucleotide
gctcctagaacccaacaggt

SEQ ID NO: 464 - DNA, 20 bp, Artificial Sequence
  Description of Artificial Sequence: Synthetic oligonucleotide
ctcctagaacccaacaggta

SEQ ID NO: 465 - DNA, 20 bp, Artificial Sequence
  Description of Artificial Sequence: Synthetic oligonucleotide
tccagacgccatctttcagg

SEQ ID NO: 466 - DNA, 20 bp, Artificial Sequence
  Description of Artificial Sequence: Synthetic oligonucleotide
tggtaagagtcctcctgccc

SEQ ID NO: 467 - DNA, 20 bp, Artificial Sequence
  Description of Artificial Sequence: Synthetic oligonucleotide
ttacagcatcttgggtcagg

SEQ ID NO: 468 - DNA, 20 bp, Artificial Sequence
  Description of Artificial Sequence: Synthetic oligonucleotide
ggtcaggtgggccggcagct

SEQ ID NO: 469 - DNA, 20 bp, Artificial Sequence
  Description of Artificial Sequence: Synthetic oligonucleotide
ctatcattggagatgacatt

SEQ ID NO: 470 - DNA, 20 bp, Artificial Sequence
  Description of Artificial Sequence: Synthetic oligonucleotide
gagatgacattaaccggaga

SEQ ID NO: 471 - DNA, 20 bp, Artificial Sequence
  Description of Artificial Sequence: Synthetic oligonucleotide
tggaactctgtgtcgtatct

SEQ ID NO: 472 - DNA, 20 bp, Artificial Sequence
  Description of Artificial Sequence: Synthetic oligonucleotide
cagaatttactggagcagct

SEQ ID NO: 473 - DNA, 20 bp, Artificial Sequence
  Description of Artificial Sequence: Synthetic oligonucleotide
actggagcagctgcagccca

SEQ ID NO: 474 - DNA, 20 bp, Artificial Sequence
  Description of Artificial Sequence: Synthetic oligonucleotide
ccagctgtgggctgcagctg

SEQ ID NO: 475 - DNA, 20 bp, Artificial Sequence
  Description of Artificial Sequence: Synthetic oligonucleotide
gtaggcattcccagctgtgg

SEQ ID NO: 476 - DNA, 20 bp, Artificial Sequence
  Description of Artificial Sequence: Synthetic oligonucleotide
gtgaagagttcgtaggcatt

SEQ ID NO: 477 - DNA, 20 bp, Artificial Sequence
  Description of Artificial Sequence: Synthetic oligonucleotide
accaagattgcctccaggta

SEQ ID NO: 478 - DNA, 20 bp, Artificial Sequence
  Description of Artificial Sequence: Synthetic oligonucleotide
cctccaggtacccaccacca

SEQ ID NO: 479 - DNA, 20 bp, Artificial Sequence
  Description of Artificial Sequence: Synthetic oligonucleotide
ctaatgtggatactaactcc

SEQ ID NO: 480 - DNA, 20 bp, Artificial Sequence
  Description of Artificial Sequence: Synthetic oligonucleotide
ttccgtgtggcagctgacat

SEQ ID NO: 481 - DNA, 20 bp, Artificial Sequence
  Description of Artificial Sequence: Synthetic oligonucleotide
ctgatggcaacttcaactgg

SEQ ID NO: 482 - DNA, 20 bp, Artificial Sequence
  Description of Artificial Sequence: Synthetic oligonucleotide
tactttgctagcaaactggt

SEQ ID NO: 483 - DNA, 20 bp, Artificial Sequence
  Description of Artificial Sequence: Synthetic oligonucleotide
agcaccagtttgctagcaaa

SEQ ID NO: 484 - DNA, 20 bp, Artificial Sequence
  Description of Artificial Sequence: Synthetic oligonucleotide
aactggggccgggttgttgc

SEQ ID NO: 485 - DNA, 20 bp, Artificial Sequence
  Description of Artificial Sequence: Synthetic oligonucleotide
ttctctttcctgtaggatga

SEQ ID NO: 486 - DNA, 20 bp, Artificial Sequence
  Description of Artificial Sequence: Synthetic oligonucleotide
tctttcctgtaggatgattg

SEQ ID NO: 487 - DNA, 20 bp, Artificial Sequence
  Description of Artificial Sequence: Synthetic oligonucleotide
cctgtaggatgattgctaat

SEQ ID NO: 488 - DNA, 20 bp, Artificial Sequence
  Description of Artificial Sequence: Synthetic oligonucleotide
ctgtaggatgattgctaatg

SEQ ID NO: 489 - DNA, 20 bp, Artificial Sequence
  Description of Artificial Sequence: Synthetic oligonucleotide
ctaatgtggatactaactcc

SEQ ID NO: 490 - DNA, 20 bp, Artificial Sequence
  Description of Artificial Sequence: Synthetic oligonucleotide
ttccgtgtggcagctgacat

SEQ ID NO: 491 - DNA, 20 bp, Artificial Sequence
  Description of Artificial Sequence: Synthetic oligonucleotide
cgtgtggcagctgacatgtt

SEQ ID NO: 492 - DNA, 20 bp, Artificial Sequence
  Description of Artificial Sequence: Synthetic oligonucleotide
ccatcagcaaacatgtcagc

SEQ ID NO: 493 - DNA, 20 bp, Artificial Sequence
  Description of Artificial Sequence: Synthetic oligonucleotide
aagttgccatcagcaaacat

SEQ ID NO: 494 - DNA, 20 bp, Artificial Sequence
  Description of Artificial Sequence: Synthetic oligonucleotide
gctgatggcaacttcaactg

SEQ ID NO: 495 - DNA, 20 bp, Artificial Sequence
  Description of Artificial Sequence: Synthetic oligonucleotide
ctgatggcaacttcaactgg

SEQ ID NO: 496 - DNA, 20 bp, Artificial Sequence
  Description of Artificial Sequence: Synthetic oligonucleotide
aactggggccgggttgttgc

SEQ ID NO: 497 - DNA, 20 bp, Artificial Sequence
  Description of Artificial Sequence: Synthetic oligonucleotide
ttgcccttttctactttgct

SEQ ID NO: 498 - DNA, 20 bp, Artificial Sequence
  Description of Artificial Sequence: Synthetic oligonucleotide
cccttttctactttgctagc

SEQ ID NO: 499 - DNA, 20 bp, Artificial Sequence
  Description of Artificial Sequence: Synthetic oligonucleotide
ctagcaaagtagaaaagggc

SEQ ID NO: 500 - DNA, 20 bp, Artificial Sequence
  Description of Artificial Sequence: Synthetic oligonucleotide
gctagcaaagtagaaaaggg

SEQ ID NO: 501 - DNA, 20 bp, Artificial Sequence
  Description of Artificial Sequence: Synthetic oligonucleotide
tctactttgctagcaaactg

SEQ ID NO: 502 - DNA, 20 bp, Artificial Sequence
  Description of Artificial Sequence: Synthetic oligonucleotide
ctactttgctagcaaactgg

SEQ ID NO: 503 - DNA, 20 bp, Artificial Sequence
  Description of Artificial Sequence: Synthetic oligonucleotide
tactttgctagcaaactggt

SEQ ID NO: 504 - DNA, 20 bp, Artificial Sequence
  Description of Artificial Sequence: Synthetic oligonucleotide
gctagcaaactggtgctcaa

SEQ ID NO: 505 - DNA, 20 bp, Artificial Sequence
  Description of Artificial Sequence: Synthetic oligonucleotide
ctagcaaactggtgctcaag

SEQ ID NO: 506 - DNA, 20 bp, Artificial Sequence
  Description of Artificial Sequence: Synthetic oligonucleotide
agcaccagtttgctagcaaa

SEQ ID NO: 507 - DNA, 20 bp, Artificial Sequence
  Description of Artificial Sequence: Synthetic oligonucleotide
ccactttgtcagtgcgtctg

SEQ ID NO: 508 - DNA, 20 bp, Artificial Sequence
  Description of Artificial Sequence: Synthetic oligonucleotide
ctcaatgggatggaaggctg

SEQ ID NO: 509 - DNA, 20 bp, Artificial Sequence
  Description of Artificial Sequence: Synthetic oligonucleotide
aggaatacatggtacacgtt

SEQ ID NO: 510 - DNA, 20 bp, Artificial Sequence
  Description of Artificial Sequence: Synthetic oligonucleotide
aagaacattttcagcttctc

SEQ ID NO: 511 - DNA, 20 bp, Artificial Sequence
  Description of Artificial Sequence: Synthetic oligonucleotide
atccactttcattctgcgtt

SEQ ID NO: 512 - DNA, 20 bp, Artificial Sequence
  Description of Artificial Sequence: Synthetic oligonucleotide
tttgttaaaggaggcaaaga

SEQ ID NO: 513 - DNA, 20 bp, Artificial Sequence
  Description of Artificial Sequence: Synthetic oligonucleotide
tccccagagtccatgtcaga

SEQ ID NO: 514 - DNA, 20 bp, Artificial Sequence
  Description of Artificial Sequence: Synthetic oligonucleotide
tcagtgcgtctgacatggac

SEQ ID NO: 515 - DNA, 20 bp, Artificial Sequence
  Description of Artificial Sequence: Synthetic oligonucleotide
gtcagtgcgtctgacatgga

SEQ ID NO: 516 - DNA, 20 bp, Artificial Sequence
  Description of Artificial Sequence: Synthetic oligonucleotide
ccactttgtcagtgcgtctg

SEQ ID NO: 517 - DNA, 20 bp, Artificial Sequence
  Description of Artificial Sequence: Synthetic oligonucleotide
tgttcccactttgtcagtgc

SEQ ID NO: 518 - DNA, 20 bp, Artificial Sequence
  Description of Artificial Sequence: Synthetic oligonucleotide
ctcaatgggatggaaggctg

SEQ ID NO: 519 - DNA, 20 bp, Artificial Sequence
  Description of Artificial Sequence: Synthetic oligonucleotide
catcccattgaggaatacat

SEQ ID NO: 520 - DNA, 20 bp, Artificial Sequence
  Description of Artificial Sequence: Synthetic oligonucleotide
aggaatacatggtacacgtt

SEQ ID NO: 521 - DNA, 20 bp, Artificial Sequence
  Description of Artificial Sequence: Synthetic oligonucleotide
aacgtgtaccatgtattcct

SEQ ID NO: 522 - DNA, 20 bp, Artificial Sequence
  Description of Artificial Sequence: Synthetic oligonucleotide
ttcaacgtgtaccatgtatt

SEQ ID NO: 523 - DNA, 20 bp, Artificial Sequence
  Description of Artificial Sequence: Synthetic oligonucleotide
aagaacattttcagcttctc

SEQ ID NO: 524 - DNA, 20 bp, Artificial Sequence
  Description of Artificial Sequence: Synthetic oligonucleotide
gagaagctgaaaatgttctt

SEQ ID NO: 525 - DNA, 20 bp, Artificial Sequence
  Description of Artificial Sequence: Synthetic oligonucleotide
tcagcttctcgaacgcagaa

SEQ ID NO: 526 - DNA, 20 bp, Artificial Sequence
  Description of Artificial Sequence: Synthetic oligonucleotide
cagcttctcgaacgcagaat

SEQ ID NO: 527 - DNA, 20 bp, Artificial Sequence
  Description of Artificial Sequence: Synthetic oligonucleotide
tgcgttcgagaagctgaaaa

SEQ ID NO: 528 - DNA, 20 bp, Artificial Sequence
  Description of Artificial Sequence: Synthetic oligonucleotide
agcttctcgaacgcagaatg

SEQ ID NO: 529 - DNA, 20 bp, Artificial Sequence
  Description of Artificial Sequence: Synthetic oligonucleotide
attctgcgttcgagaagctg

SEQ ID NO: 530 - DNA, 20 bp, Artificial Sequence
  Description of Artificial Sequence: Synthetic oligonucleotide
cattctgcgttcgagaagct

SEQ ID NO: 531 - DNA, 20 bp, Artificial Sequence
  Description of Artificial Sequence: Synthetic oligonucleotide
tcgaacgcagaatgaaagtg

SEQ ID NO: 532 - DNA, 20 bp, Artificial Sequence
  Description of Artificial Sequence: Synthetic oligonucleotide
atccactttcattctgcgtt

SEQ ID NO: 533 - DNA, 20 bp, Artificial Sequence
  Description of Artificial Sequence: Synthetic oligonucleotide
tatccactttcattctgcgt

SEQ ID NO: 534 - DNA, 20 bp, Artificial Sequence
  Description of Artificial Sequence: Synthetic oligonucleotide
ttatccactttcattctgcg

SEQ ID NO: 535 - DNA, 20 bp, Artificial Sequence
  Description of Artificial Sequence: Synthetic oligonucleotide
tttatccactttcattctgc

SEQ ID NO: 536 - DNA, 20 bp, Artificial Sequence
  Description of Artificial Sequence: Synthetic oligonucleotide
ttttatccactttcattctg

SEQ ID NO: 537 - DNA, 20 bp, Artificial Sequence
  Description of Artificial Sequence: Synthetic oligonucleotide
aacaaagaagggtcatcagt

SEQ ID NO: 538 - DNA, 20 bp, Artificial Sequence
  Description of Artificial Sequence: Synthetic oligonucleotide
cctcctttaacaaagaaggg

SEQ ID NO: 539 - DNA, 20 bp, Artificial Sequence
  Description of Artificial Sequence: Synthetic oligonucleotide
gcctcctttaacaaagaagg

SEQ ID NO: 540 - DNA, 20 bp, Artificial Sequence
  Description of Artificial Sequence: Synthetic oligonucleotide
tttgttaaaggaggcaaaga

SEQ ID NO: 541 - DNA, 20 bp, Artificial Sequence
  Description of Artificial Sequence: Synthetic oligonucleotide
gttaaaggaggcaaagacaa

SEQ ID NO: 542 - DNA, 20 bp, Artificial Sequence
  Description of Artificial Sequence: Synthetic oligonucleotide
ttaaaggaggcaaagacaaa

SEQ ID NO: 543 - DNA, 20 bp, Artificial Sequence
  Description of Artificial Sequence: Synthetic oligonucleotide
tctttgcctcctttaacaaa

SEQ ID NO: 544 - DNA, 20 bp, Artificial Sequence
  Description of Artificial Sequence: Synthetic oligonucleotide
gtctttgcctcctttaacaa

SEQ ID NO: 545 - DNA, 20 bp, Artificial Sequence
  Description of Artificial Sequence: Synthetic oligonucleotide
gtctaacttactttgtcttt

SEQ ID NO: 546 - DNA, 20 bp, Artificial Sequence
  Description of Artificial Sequence: Synthetic oligonucleotide
ttggtctaacttactttgtc

SEQ ID NO: 547 - DNA, 56 bp, Artificial Sequence
  Description of Artificial Sequence: Synthetic oligonucleotide
ctttcaagactaatagattgctccttacgaggagactggatatctgtgggacaaga

SEQ ID NO: 548 - DNA, 56 bp, Artificial Sequence
  Description of Artificial Sequence: Synthetic oligonucleotide
ctttcaagactaatagattgctccttacgaggagactcccacagatatccagaacc

SEQ ID NO: 549 - DNA, 56 bp, Artificial Sequence
  Description of Artificial Sequence: Synthetic oligonucleotide
ctttcaagactaatagattgctccttacgaggagacgagtctctcagctggtacac

SEQ ID NO: 550 - DNA, 56 bp, Artificial Sequence
  Description of Artificial Sequence: Synthetic oligonucleotide
ctttcaagactaatagattgctccttacgaggagacagagtctctcagctggtaca

SEQ ID NO: 551 - DNA, 56 bp, Artificial Sequence
  Description of Artificial Sequence: Synthetic oligonucleotide
ctttcaagactaatagattgctccttacgaggagactcactggatttagagtctct

SEQ ID NO: 552 - DNA, 56 bp, Artificial Sequence
  Description of Artificial Sequence: Synthetic oligonucleotide
ctttcaagactaatagattgctccttacgaggagacagaatcaaaatcggtgaata

SEQ ID NO: 553 - DNA, 56 bp, Artificial Sequence
  Description of Artificial Sequence: Synthetic oligonucleotide
ctttcaagactaatagattgctccttacgaggagacgagaatcaaaatcggtgaat

SEQ ID NO: 554 - DNA, 56 bp, Artificial Sequence
  Description of Artificial Sequence: Synthetic oligonucleotide
ctttcaagactaatagattgctccttacgaggagacaccgattttgattctcaaac

SEQ ID NO: 555 - DNA, 56 bp, Artificial Sequence
  Description of Artificial Sequence: Synthetic oligonucleotide
ctttcaagactaatagattgctccttacgaggagactttgagaatcaaaatcggtg

SEQ ID NO: 556 - DNA, 56 bp, Artificial Sequence
  Description of Artificial Sequence: Synthetic oligonucleotide
ctttcaagactaatagattgctccttacgaggagacgtttgagaatcaaaatcggt

SEQ ID NO: 557 - DNA, 56 bp, Artificial Sequence
  Description of Artificial Sequence: Synthetic oligonucleotide
ctttcaagactaatagattgctccttacgaggagactgattctcaaacaaatgtgt

SEQ ID NO: 558 - DNA, 56 bp, Artificial Sequence
  Description of Artificial Sequence: Synthetic oligonucleotide
ctttcaagactaatagattgctccttacgaggagacgattctcaaacaaatgtgtc

SEQ ID NO: 559 - DNA, 56 bp, Artificial Sequence
  Description of Artificial Sequence: Synthetic oligonucleotide
ctttcaagactaatagattgctccttacgaggagacattctcaaacaaatgtgtca

SEQ ID NO: 560 - DNA, 56 bp, Artificial Sequence
  Description of Artificial Sequence: Synthetic oligonucleotide
ctttcaagactaatagattgctccttacgaggagactgacacatttgtttgagaat

SEQ ID NO: 561 - DNA, 56 bp, Artificial Sequence
  Description of Artificial Sequence: Synthetic oligonucleotide
ctttcaagactaatagattgctccttacgaggagactcaaacaaatgtgtcacaaa

SEQ ID NO: 562 - DNA, 56 bp, Artificial Sequence
  Description of Artificial Sequence: Synthetic oligonucleotide
ctttcaagactaatagattgctccttacgaggagacgtgacacatttgtttgagaa

SEQ ID NO: 563 - DNA, 56 bp, Artificial Sequence
  Description of Artificial Sequence: Synthetic oligonucleotide
ctttcaagactaatagattgctccttacgaggagacctttgtgacacatttgtttg

SEQ ID NO: 564 - DNA, 56 bp, Artificial Sequence
  Description of Artificial Sequence: Synthetic oligonucleotide
ctttcaagactaatagattgctccttacgaggagactgatgtgtatatcacagaca

SEQ ID NO: 565 - DNA, 56 bp, Artificial Sequence
  Description of Artificial Sequence: Synthetic oligonucleotide
ctttcaagactaatagattgctccttacgaggagactctgtgatatacacatcaga

SEQ ID NO: 566 - DNA, 56 bp, Artificial Sequence
  Description of Artificial Sequence: Synthetic oligonucleotide
ctttcaagactaatagattgctccttacgaggagacgtctgtgatatacacatcag

SEQ ID NO: 567 - DNA, 56 bp, Artificial Sequence
  Description of Artificial Sequence: Synthetic oligonucleotide
ctttcaagactaatagattgctccttacgaggagactgtctgtgatatacacatca

SEQ ID NO: 568 - DNA, 56 bp, Artificial Sequence
  Description of Artificial Sequence: Synthetic oligonucleotide
ctttcaagactaatagattgctccttacgaggagacaagtccatagacctcatgtc

SEQ ID NO: 569 - DNA, 56 bp, Artificial Sequence
  Description of Artificial Sequence: Synthetic oligonucleotide
ctttcaagactaatagattgctccttacgaggagacctcttgaagtccatagacct

SEQ ID NO: 570 - DNA, 56 bp, Artificial Sequence
  Description of Artificial Sequence: Synthetic oligonucleotide
ctttcaagactaatagattgctccttacgaggagacaagagcaacagtgctgtggc

SEQ ID NO: 571 - DNA, 56 bp, Artificial Sequence
  Description of Artificial Sequence: Synthetic oligonucleotide
ctttcaagactaatagattgctccttacgaggagacctccaggccacagcactgtt

SEQ ID NO: 572 - DNA, 56 bp, Artificial Sequence
  Description of Artificial Sequence: Synthetic oligonucleotide
ctttcaagactaatagattgctccttacgaggagacttgctccaggccacagcact

SEQ ID NO: 573 - DNA, 56 bp, Artificial Sequence
  Description of Artificial Sequence: Synthetic oligonucleotide
ctttcaagactaatagattgctccttacgaggagacgttgctccaggccacagcac

SEQ ID NO: 574 - DNA, 56 bp, Artificial Sequence
  Description of Artificial Sequence: Synthetic oligonucleotide
ctttcaagactaatagattgctccttacgaggagaccacatgcaaagtcagatttg

SEQ ID NO: 575 - DNA, 56 bp, Artificial Sequence
  Description of Artificial Sequence: Synthetic oligonucleotide
ctttcaagactaatagattgctccttacgaggagacgcacatgcaaagtcagattt

SEQ ID NO: 576 - DNA, 56 bp, Artificial Sequence
  Description of Artificial Sequence: Synthetic oligonucleotide
ctttcaagactaatagattgctccttacgaggagacgcatgtgcaaacgccttcaa

SEQ ID NO: 577 - DNA, 56 bp, Artificial Sequence
  Description of Artificial Sequence: Synthetic oligonucleotide
ctttcaagactaatagattgctccttacgaggagacaaggcgtttgcacatgcaaa

SEQ ID NO: 578 - DNA, 56 bp, Artificial Sequence
  Description of Artificial Sequence: Synthetic oligonucleotide
ctttcaagactaatagattgctccttacgaggagaccatgtgcaaacgccttcaac

SEQ ID NO: 579 - DNA, 56 bp, Artificial Sequence
  Description of Artificial Sequence: Synthetic oligonucleotide
ctttcaagactaatagattgctccttacgaggagacttgaaggcgtttgcacatgc

SEQ ID NO: 580 - DNA, 56 bp, Artificial Sequence
  Description of Artificial Sequence: Synthetic oligonucleotide
ctttcaagactaatagattgctccttacgaggagacaacaacagcattattccaga

SEQ ID NO: 581 - DNA, 56 bp, Artificial Sequence
  Description of Artificial Sequence: Synthetic oligonucleotide
ctttcaagactaatagattgctccttacgaggagactggaataatgctgttgttga

SEQ ID NO: 582 - DNA, 56 bp, Artificial Sequence
  Description of Artificial Sequence: Synthetic oligonucleotide
ctttcaagactaatagattgctccttacgaggagacttccagaagacaccttcttc

SEQ ID NO: 583 - DNA, 56 bp, Artificial Sequence
  Description of Artificial Sequence: Synthetic oligonucleotide
ctttcaagactaatagattgctccttacgaggagaccagaagacaccttcttcccc

SEQ ID NO: 584 - DNA, 56 bp, Artificial Sequence
  Description of Artificial Sequence: Synthetic oligonucleotide
ctttcaagactaatagattgctccttacgaggagaccctgggctggggaagaaggt

SEQ ID NO: 585 - DNA, 56 bp, Artificial Sequence
  Description of Artificial Sequence: Synthetic oligonucleotide
ctttcaagactaatagattgctccttacgaggagacttccccagcccaggtaaggg

SEQ ID NO: 586 - DNA, 56 bp, Artificial Sequence
  Description of Artificial Sequence: Synthetic oligonucleotide
ctttcaagactaatagattgctccttacgaggagaccccagcccaggtaagggcag

SEQ ID NO: 587 - DNA, 56 bp, Artificial Sequence
  Description of Artificial Sequence: Synthetic oligonucleotide
ctttcaagactaatagattgctccttacgaggagactaaaaggaaaaacagacatt

SEQ ID NO: 588 - DNA, 56 bp, Artificial Sequence
  Description of Artificial Sequence: Synthetic oligonucleotide
ctttcaagactaatagattgctccttacgaggagacctaaaaggaaaaacagacat

SEQ ID NO: 589 - DNA, 56 bp, Artificial Sequence
  Description of Artificial Sequence: Synthetic oligonucleotide
ctttcaagactaatagattgctccttacgaggagacttccttttagaaagttcctg

SEQ ID NO: 590 - DNA, 56 bp, Artificial Sequence
  Description of Artificial Sequence: Synthetic oligonucleotide
ctttcaagactaatagattgctccttacgaggagactccttttagaaagttcctgt

SEQ ID NO: 591 - DNA, 56 bp, Artificial Sequence
  Description of Artificial Sequence: Synthetic oligonucleotide
ctttcaagactaatagattgctccttacgaggagacccttttagaaagttcctgtg

SEQ ID NO: 592 - DNA, 56 bp, Artificial Sequence
  Description of Artificial Sequence: Synthetic oligonucleotide
ctttcaagactaatagattgctccttacgaggagaccttttagaaagttcctgtga

SEQ ID NO: 593 - DNA, 56 bp, Artificial Sequence
  Description of Artificial Sequence: Synthetic oligonucleotide
ctttcaagactaatagattgctccttacgaggagactagaaagttcctgtgatgtc

SEQ ID NO: 594 - DNA, 56 bp, Artificial Sequence
  Description of Artificial Sequence: Synthetic oligonucleotide
ctttcaagactaatagattgctccttacgaggagacagaaagttcctgtgatgtca

SEQ ID NO: 595 - DNA, 56 bp, Artificial Sequence
  Description of Artificial Sequence: Synthetic oligonucleotide
ctttcaagactaatagattgctccttacgaggagacgaaagttcctgtgatgtcaa

SEQ ID NO: 596 - DNA, 56 bp, Artificial Sequence
  Description of Artificial Sequence: Synthetic oligonucleotide
ctttcaagactaatagattgctccttacgaggagacacatcacaggaactttctaa

SEQ ID NO: 597 - DNA, 56 bp, Artificial Sequence
  Description of Artificial Sequence: Synthetic oligonucleotide
ctttcaagactaatagattgctccttacgaggagacctgtgatgtcaagctggtcg

SEQ ID NO: 598 - DNA, 56 bp, Artificial Sequence
  Description of Artificial Sequence: Synthetic oligonucleotide
ctttcaagactaatagattgctccttacgaggagactcgaccagcttgacatcaca

SEQ ID NO: 599 - DNA, 56 bp, Artificial Sequence
  Description of Artificial Sequence: Synthetic oligonucleotide
ctttcaagactaatagattgctccttacgaggagacctcgaccagcttgacatcac

SEQ ID NO: 600 - DNA, 56 bp, Artificial Sequence
  Description of Artificial Sequence: Synthetic oligonucleotide
ctttcaagactaatagattgctccttacgaggagactctcgaccagcttgacatca

SEQ ID NO: 601 - DNA, 56 bp, Artificial Sequence
  Description of Artificial Sequence: Synthetic oligonucleotide
ctttcaagactaatagattgctccttacgaggagacaaagcttttctcgaccagct

SEQ ID NO: 602 - DNA, 56 bp, Artificial Sequence
  Description of Artificial Sequence: Synthetic oligonucleotide
ctttcaagactaatagattgctccttacgaggagaccaaagcttttctcgaccagc

SEQ ID NO: 603 - DNA, 56 bp, Artificial Sequence
  Description of Artificial Sequence: Synthetic oligonucleotide
ctttcaagactaatagattgctccttacgaggagaccctgtttcaaagcttttctc

SEQ ID NO: 604 - DNA, 56 bp, Artificial Sequence
  Description of Artificial Sequence: Synthetic oligonucleotide
ctttcaagactaatagattgctccttacgaggagacgaaacaggtaagacaggggt

SEQ ID NO: 605 - DNA, 56 bp, Artificial Sequence
  Description of Artificial Sequence: Synthetic oligonucleotide
ctttcaagactaatagattgctccttacgaggagacaaacaggtaagacaggggtc

SEQ ID NO: 606 - DNA, 57 bp, Artificial Sequence
  Description of Artificial Sequence: Synthetic oligonucleotide
gctggggaccgatcctgattgctcgctgcggcgagactggatatctgtgggacaaga

SEQ ID NO: 607 - DNA, 57 bp, Artificial Sequence
  Description of Artificial Sequence: Synthetic oligonucleotide
gctggggaccgatcctgattgctcgctgcggcgagactcccacagatatccagaacc

SEQ ID NO: 608 - DNA, 57 bp, Artificial Sequence
  Description of Artificial Sequence: Synthetic oligonucleotide
gctggggaccgatcctgattgctcgctgcggcgagacgagtctctcagctggtacac

SEQ ID NO: 609 - DNA, 57 bp, Artificial Sequence
  Description of Artificial Sequence: Synthetic oligonucleotide
gctggggaccgatcctgattgctcgctgcggcgagacagagtctctcagctggtaca

SEQ ID NO: 610 - DNA, 57 bp, Artificial Sequence
  Description of Artificial Sequence: Synthetic oligonucleotide
gctggggaccgatcctgattgctcgctgcggcgagactcactggatttagagtctct

SEQ ID NO: 611 - DNA, 57 bp, Artificial Sequence
  Description of Artificial Sequence: Synthetic oligonucleotide
gctggggaccgatcctgattgctcgctgcggcgagacagaatcaaaatcggtgaata

SEQ ID NO: 612 - DNA, 57 bp, Artificial Sequence
  Description of Artificial Sequence: Synthetic oligonucleotide
gctggggaccgatcctgattgctcgctgcggcgagacgagaatcaaaatcggtgaat

SEQ ID NO: 613 - DNA, 57 bp, Artificial Sequence
  Description of Artificial Sequence: Synthetic oligonucleotide
gctggggaccgatcctgattgctcgctgcggcgagacaccgattttgattctcaaac

SEQ ID NO: 614 - DNA, 57 bp, Artificial Sequence
  Description of Artificial Sequence: Synthetic oligonucleotide
gctggggaccgatcctgattgctcgctgcggcgagactttgagaatcaaaatcggtg

SEQ ID NO: 615 - DNA, 57 bp, Artificial Sequence
  Description of Artificial Sequence: Synthetic oligonucleotide
gctggggaccgatcctgattgctcgctgcggcgagacgtttgagaatcaaaatcggt

SEQ ID NO: 616 - DNA, 57 bp, Artificial Sequence
  Description of Artificial Sequence: Synthetic oligonucleotide
gctggggaccgatcctgattgctcgctgcggcgagactgattctcaaacaaatgtgt

SEQ ID NO: 617 - DNA, 57 bp, Artificial Sequence
  Description of Artificial Sequence: Synthetic oligonucleotide
gctggggaccgatcctgattgctcgctgcggcgagacgattctcaaacaaatgtgtc

SEQ ID NO: 618 - DNA, 57 bp, Artificial Sequence
  Description of Artificial Sequence: Synthetic oligonucleotide
gctggggaccgatcctgattgctcgctgcggcgagacattctcaaacaaatgtgtca

SEQ ID NO: 619 - DNA, 57 bp, Artificial Sequence
  Description of Artificial Sequence: Synthetic oligonucleotide
gctggggaccgatcctgattgctcgctgcggcgagactgacacatttgtttgagaat

SEQ ID NO: 620 - DNA, 57 bp, Artificial Sequence
  Description of Artificial Sequence: Synthetic oligonucleotide
gctggggaccgatcctgattgctcgctgcggcgagactcaaacaaatgtgtcacaaa

SEQ ID NO: 621 - DNA, 57 bp, Artificial Sequence
  Description of Artificial Sequence: Synthetic oligonucleotide
gctggggaccgatcctgattgctcgctgcggcgagacgtgacacatttgtttgagaa

SEQ ID NO: 622 - DNA, 57 bp, Artificial Sequence
  Description of Artificial Sequence: Synthetic oligonucleotide
gctggggaccgatcctgattgctcgctgcggcgagacctttgtgacacatttgtttg

SEQ ID NO: 623 - DNA, 57 bp, Artificial Sequence
  Description of Artificial Sequence: Synthetic oligonucleotide
gctggggaccgatcctgattgctcgctgcggcgagactgatgtgtatatcacagaca

SEQ ID NO: 624 - DNA, 57 bp, Artificial Sequence
  Description of Artificial Sequence: Synthetic oligonucleotide
gctggggaccgatcctgattgctcgctgcggcgagactctgtgatatacacatcaga

SEQ ID NO: 625 - DNA, 57 bp, Artificial Sequence
  Description of Artificial Sequence: Synthetic oligonucleotide
gctggggaccgatcctgattgctcgctgcggcgagacgtctgtgatatacacatcag

SEQ ID NO: 626 - DNA, 57 bp, Artificial Sequence
  Description of Artificial Sequence: Synthetic oligonucleotide
gctggggaccgatcctgattgctcgctgcggcgagactgtctgtgatatacacatca

SEQ ID NO: 627 - DNA, 57 bp, Artificial Sequence
  Description of Artificial Sequence: Synthetic oligonucleotide
gctggggaccgatcctgattgctcgctgcggcgagacaagtccatagacctcatgtc

SEQ ID NO: 628 - DNA, 57 bp, Artificial Sequence
  Description of Artificial Sequence: Synthetic oligonucleotide
gctggggaccgatcctgattgctcgctgcggcgagacctcttgaagtccatagacct

SEQ ID NO: 629 - DNA, 57 bp, Artificial Sequence
  Description of Artificial Sequence: Synthetic oligonucleotide
gctggggaccgatcctgattgctcgctgcggcgagacaagagcaacagtgctgtggc

SEQ ID NO: 630 - DNA, 57 bp, Artificial Sequence
  Description of Artificial Sequence: Synthetic oligonucleotide
gctggggaccgatcctgattgctcgctgcggcgagacctccaggccacagcactgtt

SEQ ID NO: 631 - DNA, 57 bp, Artificial Sequence
  Description of Artificial Sequence: Synthetic oligonucleotide
gctggggaccgatcctgattgctcgctgcggcgagacttgctccaggccacagcact

SEQ ID NO: 632 - DNA, 57 bp, Artificial Sequence
  Description of Artificial Sequence: Synthetic oligonucleotide
gctggggaccgatcctgattgctcgctgcggcgagacgttgctccaggccacagcac

SEQ ID NO: 633 - DNA, 57 bp, Artificial Sequence
  Description of Artificial Sequence: Synthetic oligonucleotide
gctggggaccgatcctgattgctcgctgcggcgagaccacatgcaaagtcagatttg

SEQ ID NO: 634 - DNA, 57 bp, Artificial Sequence
  Description of Artificial Sequence: Synthetic oligonucleotide
gctggggaccgatcctgattgctcgctgcggcgagacgcacatgcaaagtcagattt

SEQ ID NO: 635 - DNA, 57 bp, Artificial Sequence
  Description of Artificial Sequence: Synthetic oligonucleotide
gctggggaccgatcctgattgctcgctgcggcgagacgcatgtgcaaacgccttcaa

SEQ ID NO: 636 - DNA, 57 bp, Artificial Sequence
  Description of Artificial Sequence: Synthetic oligonucleotide
gctggggaccgatcctgattgctcgctgcggcgagacaaggcgtttgcacatgcaaa

SEQ ID NO: 637 - DNA, 57 bp, Artificial Sequence
  Description of Artificial Sequence: Synthetic oligonucleotide
gctggggaccgatcctgattgctcgctgcggcgagaccatgtgcaaacgccttcaac

SEQ ID NO: 638 - DNA, 57 bp, Artificial Sequence
  Description of Artificial Sequence: Synthetic oligonucleotide
gctggggaccgatcctgattgctcgctgcggcgagacttgaaggcgtttgcacatgc

SEQ ID NO: 639 - DNA, 57 bp, Artificial Sequence
  Description of Artificial Sequence: Synthetic oligonucleotide
gctggggaccgatcctgattgctcgctgcggcgagacaacaacagcattattccaga

SEQ ID NO: 640 - DNA, 57 bp, Artificial Sequence
  Description of Artificial Sequence: Synthetic oligonucleotide
gctggggaccgatcctgattgctcgctgcggcgagactggaataatgctgttgttga

SEQ ID NO: 641 - DNA, 57 bp, Artificial Sequence
  Description of Artificial Sequence: Synthetic oligonucleotide
gctggggaccgatcctgattgctcgctgcggcgagacttccagaagacaccttcttc

SEQ ID NO: 642 - DNA, 57 bp, Artificial Sequence
  Description of Artificial Sequence: Synthetic oligonucleotide
gctggggaccgatcctgattgctcgctgcggcgagaccagaagacaccttcttcccc

SEQ ID NO: 643 - DNA, 57 bp, Artificial Sequence
  Description of Artificial Sequence: Synthetic oligonucleotide
gctggggaccgatcctgattgctcgctgcggcgagaccctgggctggggaagaaggt

SEQ ID NO: 644 - DNA, 57 bp, Artificial Sequence
  Description of Artificial Sequence: Synthetic oligonucleotide
gctggggaccgatcctgattgctcgctgcggcgagacttccccagcccaggtaaggg

SEQ ID NO: 645 - DNA, 57 bp, Artificial Sequence
  Description of Artificial Sequence: Synthetic oligonucleotide
gctggggaccgatcctgattgctcgctgcggcgagaccccagcccaggtaagggcag

SEQ ID NO: 646 - DNA, 57 bp, Artificial Sequence
  Description of Artificial Sequence: Synthetic oligonucleotide
gctggggaccgatcctgattgctcgctgcggcgagactaaaaggaaaaacagacatt

SEQ ID NO: 647 - DNA, 57 bp, Artificial Sequence
  Description of Artificial Sequence: Synthetic oligonucleotide
gctggggaccgatcctgattgctcgctgcggcgagacctaaaaggaaaaacagacat

SEQ ID NO: 648 - DNA, 57 bp, Artificial Sequence
  Description of Artificial Sequence: Synthetic oligonucleotide
gctggggaccgatcctgattgctcgctgcggcgagacttccttttagaaagttcctg

SEQ ID NO: 649 - DNA, 57 bp, Artificial Sequence
  Description of Artificial Sequence: Synthetic oligonucleotide
gctggggaccgatcctgattgctcgctgcggcgagactccttttagaaagttcctgt

SEQ ID NO: 650 - DNA, 57 bp, Artificial Sequence
  Description of Artificial Sequence: Synthetic oligonucleotide
gctggggaccgatcctgattgctcgctgcggcgagacccttttagaaagttcctgtg

SEQ ID NO: 651 - DNA, 57 bp, Artificial Sequence
  Description of Artificial Sequence: Synthetic oligonucleotide
gctggggaccgatcctgattgctcgctgcggcgagaccttttagaaagttcctgtga

SEQ ID NO: 652 - DNA, 57 bp, Artificial Sequence
  Description of Artificial Sequence: Synthetic oligonucleotide
gctggggaccgatcctgattgctcgctgcggcgagactagaaagttcctgtgatgtc

SEQ ID NO: 653 - DNA, 57 bp, Artificial Sequence
  Description of Artificial Sequence: Synthetic oligonucleotide
gctggggaccgatcctgattgctcgctgcggcgagacagaaagttcctgtgatgtca

SEQ ID NO: 654 - DNA, 57 bp, Artificial Sequence
  Description of Artificial Sequence: Synthetic oligonucleotide
gctggggaccgatcctgattgctcgctgcggcgagacgaaagttcctgtgatgtcaa

SEQ ID NO: 655 - DNA, 57 bp, Artificial Sequence
  Description of Artificial Sequence: Synthetic oligonucleotide
gctggggaccgatcctgattgctcgctgcggcgagacacatcacaggaactttctaa

SEQ ID NO: 656 - DNA, 57 bp, Artificial Sequence
  Description of Artificial Sequence: Synthetic oligonucleotide
gctggggaccgatcctgattgctcgctgcggcgagacctgtgatgtcaagctggtcg

SEQ ID NO: 657 - DNA, 57 bp, Artificial Sequence
  Description of Artificial Sequence: Synthetic oligonucleotide
gctggggaccgatcctgattgctcgctgcggcgagactcgaccagcttgacatcaca

SEQ ID NO: 658 - DNA, 57 bp, Artificial Sequence
  Description of Artificial Sequence: Synthetic oligonucleotide
gctggggaccgatcctgattgctcgctgcggcgagacctcgaccagcttgacatcac

SEQ ID NO: 659 - DNA, 57 bp, Artificial Sequence
  Description of Artificial Sequence: Synthetic oligonucleotide
gctggggaccgatcctgattgctcgctgcggcgagactctcgaccagcttgacatca

SEQ ID NO: 660 - DNA, 57 bp, Artificial Sequence
  Description of Artificial Sequence: Synthetic oligonucleotide
gctggggaccgatcctgattgctcgctgcggcgagacaaagcttttctcgaccagct

SEQ ID NO: 661 - DNA, 57 bp, Artificial Sequence
  Description of Artificial Sequence: Synthetic oligonucleotide
gctggggaccgatcctgattgctcgctgcggcgagaccaaagcttttctcgaccagc

SEQ ID NO: 662 - DNA, 57 bp, Artificial Sequence
  Description of Artificial Sequence: Synthetic oligonucleotide
gctggggaccgatcctgattgctcgctgcggcgagaccctgtttcaaagcttttctc

SEQ ID NO: 663 - DNA, 57 bp, Artificial Sequence
  Description of Artificial Sequence: Synthetic oligonucleotide
gctggggaccgatcctgattgctcgctgcggcgagacgaaacaggtaagacaggggt

SEQ ID NO: 664 - DNA, 57 bp, Artificial Sequence
  Description of Artificial Sequence: Synthetic oligonucleotide
gctggggaccgatcctgattgctcgctgcggcgagacaaacaggtaagacaggggtc

SEQ ID NO: 665 - DNA, 56 bp, Artificial Sequence
  Description of Artificial Sequence: Synthetic oligonucleotide
ctttcaagactaatagattgctccttacgaggagacaatataagtggaggcgtcgc

SEQ ID NO: 666 - DNA, 56 bp, Artificial Sequence
  Description of Artificial Sequence: Synthetic oligonucleotide
ctttcaagactaatagattgctccttacgaggagacatataagtggaggcgtcgcg

SEQ ID NO: 667 - DNA, 56 bp, Artificial Sequence
  Description of Artificial Sequence: Synthetic oligonucleotide
ctttcaagactaatagattgctccttacgaggagacaggaatgcccgccagcgcga

SEQ ID NO: 668 - DNA, 56 bp, Artificial Sequence
  Description of Artificial Sequence: Synthetic oligonucleotide
ctttcaagactaatagattgctccttacgaggagacctgaagctgacagcattcgg

SEQ ID NO: 669 - DNA, 56 bp, Artificial Sequence
  Description of Artificial Sequence: Synthetic oligonucleotide
ctttcaagactaatagattgctccttacgaggagacgggccgagatgtctcgctcc

SEQ ID NO: 670 - DNA, 56 bp, Artificial Sequence
  Description of Artificial Sequence: Synthetic oligonucleotide
ctttcaagactaatagattgctccttacgaggagacgctgtgctcgcgctactctc

SEQ ID NO: 671 - DNA, 56 bp, Artificial Sequence
  Description of Artificial Sequence: Synthetic oligonucleotide
ctttcaagactaatagattgctccttacgaggagacctggcctggaggctatccag

SEQ ID NO: 672 - DNA, 56 bp, Artificial Sequence
  Description of Artificial Sequence: Synthetic oligonucleotide
ctttcaagactaatagattgctccttacgaggagactggcctggaggctatccagc

SEQ ID NO: 673 - DNA, 56 bp, Artificial Sequence
  Description of Artificial Sequence: Synthetic oligonucleotide
ctttcaagactaatagattgctccttacgaggagacatgtgtcttttcccgatatt

SEQ ID NO: 674 - DNA, 56 bp, Artificial Sequence
  Description of Artificial Sequence: Synthetic oligonucleotide
ctttcaagactaatagattgctccttacgaggagactcccgatattcctcaggtac

SEQ ID NO: 675 - DNA, 56 bp, Artificial Sequence
  Description of Artificial Sequence: Synthetic oligonucleotide
ctttcaagactaatagattgctccttacgaggagaccccgatattcctcaggtact

SEQ ID NO: 676 - DNA, 56 bp, Artificial Sequence
  Description of Artificial Sequence: Synthetic oligonucleotide
ctttcaagactaatagattgctccttacgaggagacccgatattcctcaggtactc

SEQ ID NO: 677 - DNA, 56 bp, Artificial Sequence
  Description of Artificial Sequence: Synthetic oligonucleotide
ctttcaagactaatagattgctccttacgaggagacgagtacctgaggaatatcgg

SEQ ID NO: 678 - DNA, 56 bp, Artificial Sequence
  Description of Artificial Sequence: Synthetic oligonucleotide
ctttcaagactaatagattgctccttacgaggagacggagtacctgaggaatatcg

SEQ ID NO: 679 - DNA, 56 bp, Artificial Sequence
  Description of Artificial Sequence: Synthetic oligonucleotide
ctttcaagactaatagattgctccttacgaggagacctcaggtactccaaagattc

SEQ ID NO: 680 - DNA, 56 bp, Artificial Sequence
  Description of Artificial Sequence: Synthetic oligonucleotide
ctttcaagactaatagattgctccttacgaggagacaggtttactcacgtcatcca

SEQ ID NO: 681 - DNA, 56 bp, Artificial Sequence
  Description of Artificial Sequence: Synthetic oligonucleotide
ctttcaagactaatagattgctccttacgaggagacactcacgtcatccagcagag

SEQ ID NO: 682 - DNA, 56 bp, Artificial Sequence
  Description of Artificial Sequence: Synthetic oligonucleotide
ctttcaagactaatagattgctccttacgaggagacctcacgtcatccagcagaga

SEQ ID NO: 683 - DNA, 56 bp, Artificial Sequence
  Description of Artificial Sequence: Synthetic oligonucleotide
ctttcaagactaatagattgctccttacgaggagactctgctggatgacgtgagta

SEQ ID NO: 684 - DNA, 56 bp, Artificial Sequence
  Description of Artificial Sequence: Synthetic oligonucleotide
ctttcaagactaatagattgctccttacgaggagaccattctctgctggatgacgt

SEQ ID NO: 685 - DNA, 56 bp, Artificial Sequence
  Description of Artificial Sequence: Synthetic oligonucleotide
ctttcaagactaatagattgctccttacgaggagacccattctctgctggatgacg

SEQ ID NO: 686 - DNA, 56 bp, Artificial Sequence
  Description of Artificial Sequence: Synthetic oligonucleotide
ctttcaagactaatagattgctccttacgaggagacactttccattctctgctgga

SEQ ID NO: 687 - DNA, 56 bp, Artificial Sequence
  Description of Artificial Sequence: Synthetic oligonucleotide
ctttcaagactaatagattgctccttacgaggagacgactttccattctctgctgg

SEQ ID NO: 688 - DNA, 56 bp, Artificial Sequence
  Description of Artificial Sequence: Synthetic oligonucleotide
ctttcaagactaatagattgctccttacgaggagacaggaaatttgactttccatt

SEQ ID NO: 689 - DNA, 56 bp, Artificial Sequence
  Description of Artificial Sequence: Synthetic oligonucleotide
ctttcaagactaatagattgctccttacgaggagaccctgaattgctatgtgtctg

SEQ ID NO: 690 - DNA, 56 bp, Artificial Sequence
  Description of Artificial Sequence: Synthetic oligonucleotide
ctttcaagactaatagattgctccttacgaggagacctgaattgctatgtgtctgg

SEQ ID NO: 691 - DNA, 56 bp, Artificial Sequence
  Description of Artificial Sequence: Synthetic oligonucleotide
ctttcaagactaatagattgctccttacgaggagacctatgtgtctgggtttcatc

SEQ ID NO: 692 - DNA, 56 bp, Artificial Sequence
  Description of Artificial Sequence: Synthetic oligonucleotide
ctttcaagactaatagattgctccttacgaggagacaatgtcggatggatgaaacc

SEQ ID NO: 693 - DNA, 56 bp, Artificial Sequence
  Description of Artificial Sequence: Synthetic oligonucleotide
ctttcaagactaatagattgctccttacgaggagaccatccatccgacattgaagt

SEQ ID NO: 694 - DNA, 56 bp, Artificial Sequence
  Description of Artificial Sequence: Synthetic oligonucleotide
ctttcaagactaatagattgctccttacgaggagacatccatccgacattgaagtt

SEQ ID NO: 695 - DNA, 56 bp, Artificial Sequence
  Description of Artificial Sequence: Synthetic oligonucleotide
ctttcaagactaatagattgctccttacgaggagacagtaagtcaacttcaatgtc

SEQ ID NO: 696 - DNA, 56 bp, Artificial Sequence
  Description of Artificial Sequence: Synthetic oligonucleotide
ctttcaagactaatagattgctccttacgaggagacttcagtaagtcaacttcaat

SEQ ID NO: 697 - DNA, 56 bp, Artificial Sequence
  Description of Artificial Sequence: Synthetic oligonucleotide
ctttcaagactaatagattgctccttacgaggagacaagttgacttactgaagaat

SEQ ID NO: 698 - DNA, 56 bp, Artificial Sequence
  Description of Artificial Sequence: Synthetic oligonucleotide
ctttcaagactaatagattgctccttacgaggagacacttactgaagaatggagag

SEQ ID NO: 699 - DNA, 56 bp, Artificial Sequence
  Description of Artificial Sequence: Synthetic oligonucleotide
ctttcaagactaatagattgctccttacgaggagactctctccattcttcagtaag

SEQ ID NO: 700 - DNA, 56 bp, Artificial Sequence
  Description of Artificial Sequence: Synthetic oligonucleotide
ctttcaagactaatagattgctccttacgaggagacctgaagaatggagagagaat

SEQ ID NO: 701 - DNA, 56 bp, Artificial Sequence
  Description of Artificial Sequence: Synthetic oligonucleotide
ctttcaagactaatagattgctccttacgaggagacaattctctctccattcttca

SEQ ID NO: 702 - DNA, 56 bp, Artificial Sequence
  Description of Artificial Sequence: Synthetic oligonucleotide
ctttcaagactaatagattgctccttacgaggagaccaattctctctccattcttc

SEQ ID NO: 703 - DNA, 56 bp, Artificial Sequence
  Description of Artificial Sequence: Synthetic oligonucleotide
ctttcaagactaatagattgctccttacgaggagactcaattctctctccattctt

SEQ ID NO: 704 - DNA, 56 bp, Artificial Sequence
  Description of Artificial Sequence: Synthetic oligonucleotide
ctttcaagactaatagattgctccttacgaggagacttcaattctctctccattct

SEQ ID NO: 705 - DNA, 56 bp, Artificial Sequence
  Description of Artificial Sequence: Synthetic oligonucleotide
ctttcaagactaatagattgctccttacgaggagacaaaaagtggagcattcagac

SEQ ID NO: 706 - DNA, 56 bp, Artificial Sequence
  Description of Artificial Sequence: Synthetic oligonucleotide
ctttcaagactaatagattgctccttacgaggagacctgaaagacaagtctgaatg

SEQ ID NO: 707 - DNA, 56 bp, Artificial Sequence
  Description of Artificial Sequence: Synthetic oligonucleotide
ctttcaagactaatagattgctccttacgaggagacagacttgtctttcagcaagg

SEQ ID NO: 708 - DNA, 56 bp, Artificial Sequence
  Description of Artificial Sequence: Synthetic oligonucleotide
ctttcaagactaatagattgctccttacgaggagactctttcagcaaggactggtc

SEQ ID NO: 709 - DNA, 56 bp, Artificial Sequence
  Description of Artificial Sequence: Synthetic oligonucleotide
ctttcaagactaatagattgctccttacgaggagaccagcaaggactggtctttct

SEQ ID NO: 710 - DNA, 56 bp, Artificial Sequence
  Description of Artificial Sequence: Synthetic oligonucleotide
ctttcaagactaatagattgctccttacgaggagacagcaaggactggtctttcta

SEQ ID NO: 711 - DNA, 56 bp, Artificial Sequence
  Description of Artificial Sequence: Synthetic oligonucleotide
ctttcaagactaatagattgctccttacgaggagacctatctcttgtactacactg

SEQ ID NO: 712 - DNA, 56 bp, Artificial Sequence
  Description of Artificial Sequence: Synthetic oligonucleotide
ctttcaagactaatagattgctccttacgaggagactatctcttgtactacactga

SEQ ID NO: 713 - DNA, 56 bp, Artificial Sequence
  Description of Artificial Sequence: Synthetic oligonucleotide
ctttcaagactaatagattgctccttacgaggagacagtgtagtacaagagataga

SEQ ID NO: 714 - DNA, 56 bp, Artificial Sequence
  Description of Artificial Sequence: Synthetic oligonucleotide
ctttcaagactaatagattgctccttacgaggagactactacactgaattcacccc

SEQ ID NO: 715 - DNA, 56 bp, Artificial Sequence
  Description of Artificial Sequence: Synthetic oligonucleotide
ctttcaagactaatagattgctccttacgaggagacagtgggggtgaattcagtgt

SEQ ID NO: 716 - DNA, 56 bp, Artificial Sequence
  Description of Artificial Sequence: Synthetic oligonucleotide
ctttcaagactaatagattgctccttacgaggagaccagtgggggtgaattcagtg

SEQ ID NO: 717 - DNA, 56 bp, Artificial Sequence
  Description of Artificial Sequence: Synthetic oligonucleotide
ctttcaagactaatagattgctccttacgaggagactcagtgggggtgaattcagt

SEQ ID NO: 718 - DNA, 56 bp, Artificial Sequence
  Description of Artificial Sequence: Synthetic oligonucleotide
ctttcaagactaatagattgctccttacgaggagacttcagtgggggtgaattcag

SEQ ID NO: 719 - DNA, 56 bp, Artificial Sequence
  Description of Artificial Sequence: Synthetic oligonucleotide
ctttcaagactaatagattgctccttacgaggagacacccccactgaaaaagatga

SEQ ID NO: 720 - DNA, 56 bp, Artificial Sequence
  Description of Artificial Sequence: Synthetic oligonucleotide
ctttcaagactaatagattgctccttacgaggagacacacggcaggcatactcatc

SEQ ID NO: 721 - DNA, 56 bp, Artificial Sequence
  Description of Artificial Sequence: Synthetic oligonucleotide
ctttcaagactaatagattgctccttacgaggagacggctgtgacaaagtcacatg

SEQ ID NO: 722 - DNA, 56 bp, Artificial Sequence
  Description of Artificial Sequence: Synthetic oligonucleotide
ctttcaagactaatagattgctccttacgaggagacgtcacagcccaagatagtta

SEQ ID NO: 723 - DNA, 56 bp, Artificial Sequence
  Description of Artificial Sequence: Synthetic oligonucleotide
ctttcaagactaatagattgctccttacgaggagactcacagcccaagatagttaa

SEQ ID NO: 724 - DNA, 56 bp, Artificial Sequence
  Description of Artificial Sequence: Synthetic oligonucleotide
ctttcaagactaatagattgctccttacgaggagacactatcttgggctgtgacaa

SEQ ID NO: 725 - DNA, 56 bp, Artificial Sequence
  Description of Artificial Sequence: Synthetic oligonucleotide
ctttcaagactaatagattgctccttacgaggagacccccacttaactatcttggg

SEQ ID NO: 726 - DNA, 57 bp, Artificial Sequence
  Description of Artificial Sequence: Synthetic oligonucleotide
gctggggaccgatcctgattgctcgctgcggcgagacaatataagtggaggcgtcgc

SEQ ID NO: 727 - DNA, 57 bp, Artificial Sequence
  Description of Artificial Sequence: Synthetic oligonucleotide
gctggggaccgatcctgattgctcgctgcggcgagacatataagtggaggcgtcgcg

SEQ ID NO: 728 - DNA, 57 bp, Artificial Sequence
  Description of Artificial Sequence: Synthetic oligonucleotide
gctggggaccgatcctgattgctcgctgcggcgagacaggaatgcccgccagcgcga

SEQ ID NO: 729 - DNA, 57 bp, Artificial Sequence
  Description of Artificial Sequence: Synthetic oligonucleotide
gctggggaccgatcctgattgctcgctgcggcgagacctgaagctgacagcattcgg

SEQ ID NO: 730 - DNA, 57 bp, Artificial Sequence
  Description of Artificial Sequence: Synthetic oligonucleotide
gctggggaccgatcctgattgctcgctgcggcgagacgggccgagatgtctcgctcc

SEQ ID NO: 731 - DNA, 57 bp, Artificial Sequence
  Description of Artificial Sequence: Synthetic oligonucleotide
gctggggaccgatcctgattgctcgctgcggcgagacgctgtgctcgcgctactctc

SEQ ID NO: 732 - DNA, 57 bp, Artificial Sequence
  Description of Artificial Sequence: Synthetic oligonucleotide
gctggggaccgatcctgattgctcgctgcggcgagacctggcctggaggctatccag

SEQ ID NO: 733 - DNA, 57 bp, Artificial Sequence
  Description of Artificial Sequence: Synthetic oligonucleotide
gctggggaccgatcctgattgctcgctgcggcgagactggcctggaggctatccagc

SEQ ID NO: 734 - DNA, 57 bp, Artificial Sequence
  Description of Artificial Sequence: Synthetic oligonucleotide
gctggggaccgatcctgattgctcgctgcggcgagacatgtgtcttttcccgatatt

SEQ ID NO: 735 - DNA, 57 bp, Artificial Sequence
  Description of Artificial Sequence: Synthetic oligonucleotide
gctggggaccgatcctgattgctcgctgcggcgagactcccgatattcctcaggtac

SEQ ID NO: 736 - DNA, 57 bp, Artificial Sequence
  Description of Artificial Sequence: Synthetic oligonucleotide
gctggggaccgatcctgattgctcgctgcggcgagaccccgatattcctcaggtact

SEQ ID NO: 737 - DNA, 57 bp, Artificial Sequence
  Description of Artificial Sequence: Synthetic oligonucleotide
gctggggaccgatcctgattgctcgctgcggcgagacccgatattcctcaggtactc

SEQ ID NO: 738 - DNA, 57 bp, Artificial Sequence
  Description of Artificial Sequence: Synthetic oligonucleotide
gctggggaccgatcctgattgctcgctgcggcgagacgagtacctgaggaatatcgg

SEQ ID NO: 739 - DNA, 57 bp, Artificial Sequence
  Description of Artificial Sequence: Synthetic oligonucleotide
gctggggaccgatcctgattgctcgctgcggcgagacggagtacctgaggaatatcg

SEQ ID NO: 740 - DNA, 57 bp, Artificial Sequence
  Description of Artificial Sequence: Synthetic oligonucleotide
gctggggaccgatcctgattgctcgctgcggcgagacctcaggtactccaaagattc

SEQ ID NO: 741 - DNA, 57 bp, Artificial Sequence
  Description of Artificial Sequence: Synthetic oligonucleotide
gctggggaccgatcctgattgctcgctgcggcgagacaggtttactcacgtcatcca

SEQ ID NO: 742 - DNA, 57 bp, Artificial Sequence
  Description of Artificial Sequence: Synthetic oligonucleotide
gctggggaccgatcctgattgctcgctgcggcgagacactcacgtcatccagcagag

SEQ ID NO: 743 - DNA, 57 bp, Artificial Sequence
  Description of Artificial Sequence: Synthetic oligonucleotide
gctggggaccgatcctgattgctcgctgcggcgagacctcacgtcatccagcagaga

SEQ ID NO: 744 - DNA, 57 bp, Artificial Sequence
  Description of Artificial Sequence: Synthetic oligonucleotide
gctggggaccgatcctgattgctcgctgcggcgagactctgctggatgacgtgagta

SEQ ID NO: 745 - DNA, 57 bp, Artificial Sequence
  Description of Artificial Sequence: Synthetic oligonucleotide
gctggggaccgatcctgattgctcgctgcggcgagaccattctctgctggatgacgt

SEQ ID NO: 746 - DNA, 57 bp, Artificial Sequence
  Description of Artificial Sequence: Synthetic oligonucleotide
gctggggaccgatcctgattgctcgctgcggcgagacccattctctgctggatgacg

SEQ ID NO: 747 - DNA, 57 bp, Artificial Sequence
  Description of Artificial Sequence: Synthetic oligonucleotide
gctggggaccgatcctgattgctcgctgcggcgagacactttccattctctgctgga

SEQ ID NO: 748 - DNA, 57 bp, Artificial Sequence
  Description of Artificial Sequence: Synthetic oligonucleotide
gctggggaccgatcctgattgctcgctgcggcgagacgactttccattctctgctgg

SEQ ID NO: 749 - DNA, 57 bp, Artificial Sequence
  Description of Artificial Sequence: Synthetic oligonucleotide
gctggggaccgatcctgattgctcgctgcggcgagacaggaaatttgactttccatt

SEQ ID NO: 750 - DNA, 57 bp, Artificial Sequence
  Description of Artificial Sequence: Synthetic oligonucleotide
gctggggaccgatcctgattgctcgctgcggcgagaccctgaattgctatgtgtctg

SEQ ID NO: 751 - DNA, 57 bp, Artificial Sequence
  Description of Artificial Sequence: Synthetic oligonucleotide
gctggggaccgatcctgattgctcgctgcggcgagacctgaattgctatgtgtctgg

SEQ ID NO: 752 - DNA, 57 bp, Artificial Sequence
  Description of Artificial Sequence: Synthetic oligonucleotide
gctggggaccgatcctgattgctcgctgcggcgagacctatgtgtctgggtttcatc

SEQ ID NO: 753 - DNA, 57 bp, Artificial Sequence
  Description of Artificial Sequence: Synthetic oligonucleotide
gctggggaccgatcctgattgctcgctgcggcgagacaatgtcggatggatgaaacc

SEQ ID NO: 754 - DNA, 57 bp, Artificial Sequence
  Description of Artificial Sequence: Synthetic oligonucleotide
gctggggaccgatcctgattgctcgctgcggcgagaccatccatccgacattgaagt

SEQ ID NO: 755 - DNA, 57 bp, Artificial Sequence
  Description of Artificial Sequence: Synthetic oligonucleotide
gctggggaccgatcctgattgctcgctgcggcgagacatccatccgacattgaagtt

SEQ ID NO: 756 - DNA, 57 bp, Artificial Sequence
  Description of Artificial Sequence: Synthetic oligonucleotide
gctggggaccgatcctgattgctcgctgcggcgagacagtaagtcaacttcaatgtc

SEQ ID NO: 757 - DNA, 57 bp, Artificial Sequence
  Description of Artificial Sequence: Synthetic oligonucleotide
gctggggaccgatcctgattgctcgctgcggcgagacttcagtaagtcaacttcaat

SEQ ID NO: 758 - DNA, 57 bp, Artificial Sequence
  Description of Artificial Sequence: Synthetic oligonucleotide
gctggggaccgatcctgattgctcgctgcggcgagacaagttgacttactgaagaat

SEQ ID NO: 759 - DNA, 57 bp, Artificial Sequence
  Description of Artificial Sequence: Synthetic oligonucleotide
gctggggaccgatcctgattgctcgctgcggcgagacacttactgaagaatggagag

SEQ ID NO: 760 - DNA, 57 bp, Artificial Sequence
  Description of Artificial Sequence: Synthetic oligonucleotide
gctggggaccgatcctgattgctcgctgcggcgagactctctccattcttcagtaag

SEQ ID NO: 761 - DNA, 57 bp, Artificial Sequence
  Description of Artificial Sequence: Synthetic oligonucleotide
gctggggaccgatcctgattgctcgctgcggcgagacctgaagaatggagagagaat

SEQ ID NO: 762 - DNA, 57 bp, Artificial Sequence
  Description of Artificial Sequence: Synthetic oligonucleotide
gctggggaccgatcctgattgctcgctgcggcgagacaattctctctccattcttca

SEQ ID NO: 763 - DNA, 57 bp, Artificial Sequence
  Description of Artificial Sequence: Synthetic oligonucleotide
gctggggaccgatcctgattgctcgctgcggcgagaccaattctctctccattcttc

SEQ ID NO: 764 - DNA, 57 bp, Artificial Sequence
  Description of Artificial Sequence: Synthetic oligonucleotide
gctggggaccgatcctgattgctcgctgcggcgagactcaattctctctccattctt

SEQ ID NO: 765 - DNA, 57 bp, Artificial Sequence
  Description of Artificial Sequence: Synthetic oligonucleotide
gctggggaccgatcctgattgctcgctgcggcgagacttcaattctctctccattct

SEQ ID NO: 766 - DNA, 57 bp, Artificial Sequence
  Description of Artificial Sequence: Synthetic oligonucleotide
gctggggaccgatcctgattgctcgctgcggcgagacaaaaagtggagcattcagac

SEQ ID NO: 767 - DNA, 57 bp, Artificial Sequence
  Description of Artificial Sequence: Synthetic oligonucleotide
gctggggaccgatcctgattgctcgctgcggcgagacctgaaagacaagtctgaatg

SEQ ID NO: 768 - DNA, 57 bp, Artificial Sequence
  Description of Artificial Sequence: Synthetic oligonucleotide
gctggggaccgatcctgattgctcgctgcggcgagacagacttgtctttcagcaagg

SEQ ID NO: 769 - DNA, 57 bp, Artificial Sequence
  Description of Artificial Sequence: Synthetic oligonucleotide
gctggggaccgatcctgattgctcgctgcggcgagactctttcagcaaggactggtc

SEQ ID NO: 770 - DNA, 57 bp, Artificial Sequence
  Description of Artificial Sequence: Synthetic oligonucleotide
gctggggaccgatcctgattgctcgctgcggcgagaccagcaaggactggtctttct

SEQ ID NO: 771 - DNA, 57 bp, Artificial Sequence
  Description of Artificial Sequence: Synthetic oligonucleotide
gctggggaccgatcctgattgctcgctgcggcgagacagcaaggactggtctttcta

SEQ ID NO: 772 - DNA, 57 bp, Artificial Sequence
  Description of Artificial Sequence: Synthetic oligonucleotide
gctggggaccgatcctgattgctcgctgcggcgagacctatctcttgtactacactg

SEQ ID NO: 773 - DNA, 57 bp, Artificial Sequence
  Description of Artificial Sequence: Synthetic oligonucleotide
gctggggaccgatcctgattgctcgctgcggcgagactatctcttgtactacactga

SEQ ID NO: 774 - DNA, 57 bp, Artificial Sequence
  Description of Artificial Sequence: Synthetic oligonucleotide
gctggggaccgatcctgattgctcgctgcggcgagacagtgtagtacaagagataga

SEQ ID NO: 775 - DNA, 57 bp, Artificial Sequence
  Description of Artificial Sequence: Synthetic oligonucleotide
gctggggaccgatcctgattgctcgctgcggcgagactactacactgaattcacccc

SEQ ID NO: 776 - DNA, 57 bp, Artificial Sequence
  Description of Artificial Sequence: Synthetic oligonucleotide
gctggggaccgatcctgattgctcgctgcggcgagacagtgggggtgaattcagtgt

SEQ ID NO: 777 - DNA, 57 bp, Artificial Sequence
  Description of Artificial Sequence: Synthetic oligonucleotide
gctggggaccgatcctgattgctcgctgcggcgagaccagtgggggtgaattcagtg

SEQ ID NO: 778 - DNA, 57 bp, Artificial Sequence
  Description of Artificial Sequence: Synthetic oligonucleotide
gctggggaccgatcctgattgctcgctgcggcgagactcagtgggggtgaattcagt

SEQ ID NO: 779 - DNA, 57 bp, Artificial Sequence
  Description of Artificial Sequence: Synthetic oligonucleotide
gctggggaccgatcctgattgctcgctgcggcgagacttcagtgggggtgaattcag

SEQ ID NO: 780 - DNA, 57 bp, Artificial Sequence
  Description of Artificial Sequence: Synthetic oligonucleotide
gctggggaccgatcctgattgctcgctgcggcgagacacccccactgaaaaagatga

SEQ ID NO: 781 - DNA, 57 bp, Artificial Sequence
  Description of Artificial Sequence: Synthetic oligonucleotide
gctggggaccgatcctgattgctcgctgcggcgagacacacggcaggcatactcatc

SEQ ID NO: 782 - DNA, 57 bp, Artificial Sequence
  Description of Artificial Sequence: Synthetic oligonucleotide
gctggggaccgatcctgattgctcgctgcggcgagacggctgtgacaaagtcacatg

SEQ ID NO: 783 - DNA, 57 bp, Artificial Sequence
  Description of Artificial Sequence: Synthetic oligonucleotide
gctggggaccgatcctgattgctcgctgcggcgagacgtcacagcccaagatagtta

SEQ ID NO: 784 - DNA, 57 bp, Artificial Sequence
  Description of Artificial Sequence: Synthetic oligonucleotide
gctggggaccgatcctgattgctcgctgcggcgagactcacagcccaagatagttaa

SEQ ID NO: 785 - DNA, 57 bp, Artificial Sequence
  Description of Artificial Sequence: Synthetic oligonucleotide
gctggggaccgatcctgattgctcgctgcggcgagacactatcttgggctgtgacaa

SEQ ID NO: 786 - DNA, 57 bp, Artificial Sequence
  Description of Artificial Sequence: Synthetic oligonucleotide
gctggggaccgatcctgattgctcgctgcggcgagacccccacttaactatcttggg

SEQ ID NO: 787 - RNA, 56 nt, Artificial Sequence
  Description of Artificial Sequence: Synthetic oligonucleotide
cuuucaagacuaauagauugcuccuuacgaggagacccuuccgcucaccuccgccu

SEQ ID NO: 788 - RNA, 56 nt, Artificial Sequence; identical to SEQ ID NO: 787
  Description of Artificial Sequence: Synthetic oligonucleotide

SEQ ID NO: 789 - RNA, 56 nt, Artificial Sequence
  Description of Artificial Sequence: Synthetic oligonucleotide
cuuucaagacuaauagauugcuccuuacgaggagaccgcucaccuccgccugagca

SEQ ID NO: 790 - RNA, 56 nt, Artificial Sequence
  Description of Artificial Sequence: Synthetic oligonucleotide
cuuucaagacuaauagauugcuccuuacgaggagacuccacugcucaggcggaggu

SEQ ID NO: 791 - RNA, 56 nt, Artificial Sequence
  Description of Artificial Sequence: Synthetic oligonucleotide
cuuucaagacuaauagauugcuccuuacgaggagacuagcaccgcccagacgacug

SEQ ID NO: 792 - RNA, 56 nt, Artificial Sequence
  Description of Artificial Sequence: Synthetic oligonucleotide
cuuucaagacuaauagauugcuccuuacgaggagacaggcaugcagaucccacagg

SEQ ID NO: 793 - RNA, 56 nt, Artificial Sequence
  Description of Artificial Sequence: Synthetic oligonucleotide
cuuucaagacuaauagauugcuccuuacgaggagaccacaggcgcccuggccaguc

SEQ ID NO: 794 - RNA, 56 nt, Artificial Sequence
  Description of Artificial Sequence: Synthetic oligonucleotide
cuuucaagacuaauagauugcuccuuacgaggagacucugggcggugcuacaacug

SEQ ID NO: 795 - RNA, 56 nt, Artificial Sequence
  Description of Artificial Sequence: Synthetic oligonucleotide
cuuucaagacuaauagauugcuccuuacgaggagacgcaugccuggagcagcccca

SEQ ID NO: 796 - RNA, 56 nt, Artificial Sequence; identical to SEQ ID NO: 791
  Description of Artificial Sequence: Synthetic oligonucleotide

SEQ ID NO: 797 - RNA, 56 nt, Artificial Sequence
  Description of Artificial Sequence: Synthetic oligonucleotide
cuuucaagacuaauagauugcuccuuacgaggagacuggccgccagcccaguugua

SEQ ID NO: 798 - RNA, 56 nt, Artificial Sequence
  Description of Artificial Sequence: Synthetic oligonucleotide
cuuucaagacuaauagauugcuccuuacgaggagaccuuccgcucaccuccgccug

SEQ ID NO: 799 - RNA, 56 nt, Artificial Sequence
  Description of Artificial Sequence: Synthetic oligonucleotide
cuuucaagacuaauagauugcuccuuacgaggagaccagggccugucuggggaguc

SEQ ID NO: 800 - RNA, 56 nt, Artificial Sequence
  Description of Artificial Sequence: Synthetic oligonucleotide
cuuucaagacuaauagauugcuccuuacgaggagacuccccagcccugcucguggu

SEQ ID NO: 801 - RNA, 56 nt, Artificial Sequence
  Description of Artificial Sequence: Synthetic oligonucleotide
cuuucaagacuaauagauugcuccuuacgaggagacggucaccacgagcagggcug

SEQ ID NO: 802 - RNA, 56 nt, Artificial Sequence
  Description of Artificial Sequence: Synthetic oligonucleotide
cuuucaagacuaauagauugcuccuuacgaggagacuccccuucggucaccacgag

SEQ ID NO: 803 - RNA, 56 nt, Artificial Sequence
  Description of Artificial Sequence: Synthetic oligonucleotide
cuuucaagacuaauagauugcuccuuacgaggagacgagaagcugcaggugaaggu

SEQ ID NO: 804 - RNA, 56 nt, Artificial Sequence
  Description of Artificial Sequence: Synthetic oligonucleotide
cuuucaagacuaauagauugcuccuuacgaggagacaccugcagcuucuccaacac

SEQ ID NO: 805 - RNA, 56 nt, Artificial Sequence
  Description of Artificial Sequence: Synthetic oligonucleotide
cuuucaagacuaauagauugcuccuuacgaggagacuccaacacaucggagagcuu

SEQ ID NO: 806 - RNA, 56 nt, Artificial Sequence
  Description of Artificial Sequence: Synthetic oligonucleotide
cuuucaagacuaauagauugcuccuuacgaggagacgcacgaagcucuccgaugug

SEQ ID NO: 807 - RNA, 56 nt, Artificial Sequence
  Description of Artificial Sequence: Synthetic oligonucleotide
cuuucaagacuaauagauugcuccuuacgaggagacagcacgaagcucuccgaugu

SEQ ID NO: 808 - RNA, 56 nt, Artificial Sequence
  Description of Artificial Sequence: Synthetic oligonucleotide
cuuucaagacuaauagauugcuccuuacgaggagacgugcuaaacugguaccgcau

SEQ ID NO: 809 - RNA, 56 nt, Artificial Sequence
  Description of Artificial Sequence: Synthetic oligonucleotide
cuuucaagacuaauagauugcuccuuacgaggagaccuggggcucaugcgguacca

SEQ ID NO: 810 - RNA, 56 nt, Artificial Sequence
  Description of Artificial Sequence: Synthetic oligonucleotide
cuuucaagacuaauagauugcuccuuacgaggagacuccgucugguugcuggggcu

SEQ ID NO: 811 - RNA, 56 nt, Artificial Sequence
  Description of Artificial Sequence: Synthetic oligonucleotide
cuuucaagacuaauagauugcuccuuacgaggagaccccgaggaccgcagccagcc

SEQ ID NO: 812 - RNA, 56 nt, Artificial Sequence
  Description of Artificial Sequence: Synthetic oligonucleotide
cuuucaagacuaauagauugcuccuuacgaggagacugugacacggaagcggcagu

SEQ ID NO: 813 - RNA, 56 nt, Artificial Sequence
  Description of Artificial Sequence: Synthetic oligonucleotide
cuuucaagacuaauagauugcuccuuacgaggagaccgugucacacaacugcccaa

SEQ ID NO: 814 - RNA, 56 nt, Artificial Sequence
  Description of Artificial Sequence: Synthetic oligonucleotide
cuuucaagacuaauagauugcuccuuacgaggagacggcaguugugugacacggaa

SEQ ID NO: 815 - RNA, 56 nt, Artificial Sequence
  Description of Artificial Sequence: Synthetic oligonucleotide
cuuucaagacuaauagauugcuccuuacgaggagaccacaugagcguggucagggc

SEQ ID NO: 816 - RNA, 56 nt, Artificial Sequence
  Description of Artificial Sequence: Synthetic oligonucleotide
cuuucaagacuaauagauugcuccuuacgaggagaccgccgggcccugaccacgcu

SEQ ID NO: 817 - RNA, 56 nt, Artificial Sequence
  Description of Artificial Sequence: Synthetic oligonucleotide
cuuucaagacuaauagauugcuccuuacgaggagacggggccagggagauggcccc

SEQ ID NO: 818 - RNA, 56 nt, Artificial Sequence
  Description of Artificial Sequence: Synthetic oligonucleotide
cuuucaagacuaauagauugcuccuuacgaggagacaucugcgccuugggggccag

SEQ ID NO: 819 - RNA, 56 nt, Artificial Sequence
  Description of Artificial Sequence: Synthetic oligonucleotide
cuuucaagacuaauagauugcuccuuacgaggagacgaucugcgccuugggggcca

SEQ ID NO: 820 - RNA, 56 nt, Artificial Sequence
  Description of Artificial Sequence: Synthetic oligonucleotide
cuuucaagacuaauagauugcuccuuacgaggagacccagacaggcccuggaaccc

SEQ ID NO: 821 - RNA, 56 nt, Artificial Sequence
  Description of Artificial Sequence: Synthetic oligonucleotide
cuuucaagacuaauagauugcuccuuacgaggagacccagcccugcucguggugac

SEQ ID NO: 822 - RNA, 56 nt, Artificial Sequence
  Description of Artificial Sequence: Synthetic oligonucleotide
cuuucaagacuaauagauugcuccuuacgaggagacucucuggaagggcacaaagg

SEQ ID NO: 823 - RNA, 56 nt, Artificial Sequence
  Description of Artificial Sequence: Synthetic oligonucleotide
cuuucaagacuaauagauugcuccuuacgaggagacgugcccuuccagagagaagg

SEQ ID NO: 824 - RNA, 56 nt, Artificial Sequence
  Description of Artificial Sequence: Synthetic oligonucleotide
cuuucaagacuaauagauugcuccuuacgaggagacugcccuuccagagagaaggg

SEQ ID NO: 825 - RNA, 56 nt, Artificial Sequence
  Description of Artificial Sequence: Synthetic oligonucleotide
cuuucaagacuaauagauugcuccuuacgaggagacugcccuucucucuggaaggg

SEQ ID NO: 826 - RNA, 56 nt, Artificial Sequence
  Description of Artificial Sequence: Synthetic oligonucleotide
cuuucaagacuaauagauugcuccuuacgaggagaccagagagaagggcagaagug

SEQ ID NO: 827 - RNA, 56 nt, Artificial Sequence
  Description of Artificial Sequence: Synthetic oligonucleotide
cuuucaagacuaauagauugcuccuuacgaggagacgaacuggccggcuggccugg

SEQ ID NO: 828 - RNA, 56 nt, Artificial Sequence
  Description of Artificial Sequence: Synthetic oligonucleotide
cuuucaagacuaauagauugcuccuuacgaggagacggaacuggccggcuggccug

SEQ ID NO: 829 - RNA, 56 nt, Artificial Sequence
  Description of Artificial Sequence: Synthetic oligonucleotide
cuuucaagacuaauagauugcuccuuacgaggagaccaaacccuggugguuggugu

SEQ ID NO: 830 - RNA, 56 nt, Artificial Sequence
  Description of Artificial Sequence: Synthetic oligonucleotide
cuuucaagacuaauagauugcuccuuacgaggagacgugucgugggcggccugcug

SEQ ID NO: 831 - RNA, 56 nt, Artificial Sequence
  Description of Artificial Sequence: Synthetic oligonucleotide
cuuucaagacuaauagauugcuccuuacgaggagacccucgugcggcccgggagca

SEQ ID NO: 832 - RNA, 56 nt, Artificial Sequence
  Description of Artificial Sequence: Synthetic oligonucleotide
cuuucaagacuaauagauugcuccuuacgaggagacucccugcagagaaacacacu

SEQ ID NO: 833 - RNA, 56 nt, Artificial Sequence
  Description of Artificial Sequence: Synthetic oligonucleotide
cuuucaagacuaauagauugcuccuuacgaggagaccucugcagggacaauaggag

SEQ ID NO: 834 - RNA, 56 nt, Artificial Sequence
  Description of Artificial Sequence: Synthetic oligonucleotide
cuuucaagacuaauagauugcuccuuacgaggagacucugcagggacaauaggagc

SEQ ID NO: 835 - RNA, 56 nt, Artificial Sequence
  Description of Artificial Sequence: Synthetic oligonucleotide
cuuucaagacuaauagauugcuccuuacgaggagaccuccucaaagaaggaggacc

SEQ ID NO: 836 - RNA, 56 nt, Artificial Sequence
  Description of Artificial Sequence: Synthetic oligonucleotide
cuuucaagacuaauagauugcuccuuacgaggagacuccucaaagaaggaggaccc

SEQ ID NO: 837 - RNA, 56 nt, Artificial Sequence
  Description of Artificial Sequence: Synthetic oligonucleotide
cuuucaagacuaauagauugcuccuuacgaggagacucuguggacuauggggagcu

SEQ ID NO: 838 - RNA, 56 nt, Artificial Sequence
  Description of Artificial Sequence: Synthetic oligonucleotide
cuuucaagacuaauagauugcuccuuacgaggagacucucgccacuggaaauccag

SEQ ID NO: 839 - RNA, 56 nt, Artificial Sequence
  Description of Artificial Sequence: Synthetic oligonucleotide
cuuucaagacuaauagauugcuccuuacgaggagacccaguggcgagagaagaccc

SEQ ID NO: 840 - RNA, 56 nt, Artificial Sequence
  Description of Artificial Sequence: Synthetic oligonucleotide
cuuucaagacuaauagauugcuccuuacgaggagaccaguggcgagagaagacccc

SEQ ID NO: 841 - RNA, 56 nt, Artificial Sequence
  Description of Artificial Sequence: Synthetic oligonucleotide
cuuucaagacuaauagauugcuccuuacgaggagaccgcuaggaaagacaauggug

SEQ ID NO: 842 - RNA, 56 nt, Artificial Sequence
  Description of Artificial Sequence: Synthetic oligonucleotide
cuuucaagacuaauagauugcuccuuacgaggagacucuuuccuagcggaaugggc

SEQ ID NO: 843 - RNA, 56 nt, Artificial Sequence
  Description of Artificial Sequence: Synthetic oligonucleotide
cuuucaagacuaauagauugcuccuuacgaggagacccuagcggaaugggcaccuc

SEQ ID NO: 844 - RNA, 56 nt, Artificial Sequence
  Description of Artificial Sequence: Synthetic oligonucleotide
cuuucaagacuaauagauugcuccuuacgaggagaccuagcggaaugggcaccuca

SEQ ID NO: 845 - RNA, 56 nt, Artificial Sequence
  Description of Artificial Sequence: Synthetic oligonucleotide
cuuucaagacuaauagauugcuccuuacgaggagacgccccucugaccggcuuccu

SEQ ID NO: 846 - RNA, 56 nt, Artificial Sequence
  Description of Artificial Sequence: Synthetic oligonucleotide
cuuucaagacuaauagauugcuccuuacgaggagaccuuggccaccaguguucugc

SEQ ID NO: 847 - RNA, 56 nt, Artificial Sequence
  Description of Artificial Sequence: Synthetic oligonucleotide
cuuucaagacuaauagauugcuccuuacgaggagacgccaccaguguucugcagac

SEQ ID NO: 848 - RNA, 56 nt, Artificial Sequence
  Description of Artificial Sequence: Synthetic oligonucleotide
cuuucaagacuaauagauugcuccuuacgaggagacugcagacccuccaccaugag

SEQ ID NO: 849 - RNA, 56 nt, Artificial Sequence
  Description of Artificial Sequence: Synthetic oligonucleotide
cuuucaagacuaauagauugcuccuuacgaggagacuccugaggaaaugcgcugac

SEQ ID NO: 850 - RNA, 56 nt, Artificial Sequence
  Description of Artificial Sequence: Synthetic oligonucleotide
cuuucaagacuaauagauugcuccuuacgaggagacccucaggagaagcaggcagg

SEQ ID NO: 851 - RNA, 56 nt, Artificial Sequence
  Description of Artificial Sequence: Synthetic oligonucleotide
cuuucaagacuaauagauugcuccuuacgaggagaccucaggagaagcaggcaggg

SEQ ID NO: 852 - RNA, 56 nt, Artificial Sequence
  Description of Artificial Sequence: Synthetic oligonucleotide
cuuucaagacuaauagauugcuccuuacgaggagaccaggccguccaggggcugag

SEQ ID NO: 853 - RNA, 56 nt, Artificial Sequence
  Description of Artificial Sequence: Synthetic oligonucleotide
cuuucaagacuaauagauugcuccuuacgaggagacagacaugaguccuguggugg

SEQ ID NO: 854 - RNA, 56 nt, Artificial Sequence
  Description of Artificial Sequence: Synthetic oligonucleotide
cuuucaagacuaauagauugcuccuuacgaggagacagguccugccagcacagagc

SEQ ID NO: 855 - RNA, 56 nt, Artificial Sequence
  Description of Artificial Sequence: Synthetic oligonucleotide
cuuucaagacuaauagauugcuccuuacgaggagacagggagcuggacgcaggcag

SEQ ID NO: 856 - RNA, 56 nt, Artificial Sequence
  Description of Artificial Sequence: Synthetic oligonucleotide
cuuucaagacuaauagauugcuccuuacgaggagacagccccgggccgcaggcagc

SEQ ID NO: 857 - RNA, 56 nt, Artificial Sequence
  Description of Artificial Sequence: Synthetic oligonucleotide
cuuucaagacuaauagauugcuccuuacgaggagacaggcaggaggcuccggggcg

SEQ ID NO: 858 - RNA, 56 nt, Artificial Sequence
  Description of Artificial Sequence: Synthetic oligonucleotide
cuuucaagacuaauagauugcuccuuacgaggagacggggcugguuggagauggcc

SEQ ID NO: 859 - RNA, 56 nt, Artificial Sequence
  Description of Artificial Sequence: Synthetic oligonucleotide
cuuucaagacuaauagauugcuccuuacgaggagacgagauggccuuggagcagcc

SEQ ID NO: 860 - RNA, 56 nt, Artificial Sequence
  Description of Artificial Sequence: Synthetic oligonucleotide
cuuucaagacuaauagauugcuccuuacgaggagacgcugcuccaaggccaucucc

SEQ ID NO: 861 - RNA, 56 nt, Artificial Sequence
  Description of Artificial Sequence: Synthetic oligonucleotide
cuuucaagacuaauagauugcuccuuacgaggagacgagcagccaaggugccccug

SEQ ID NO: 862 - RNA, 56 nt, Artificial Sequence
  Description of Artificial Sequence: Synthetic oligonucleotide
cuuucaagacuaauagauugcuccuuacgaggagacgggaugccacugccaggggc

SEQ ID NO: 863 - RNA, 56 nt, Artificial Sequence
  Description of Artificial Sequence: Synthetic oligonucleotide
cuuucaagacuaauagauugcuccuuacgaggagaccgggaugccacugccagggg

SEQ ID NO: 864 - RNA, 56 nt, Artificial Sequence
  Description of Artificial Sequence: Synthetic oligonucleotide
cuuucaagacuaauagauugcuccuuacgaggagacggcccugcguccagggcguu

SEQ ID NO: 865 - RNA, 56 nt, Artificial Sequence
  Description of Artificial Sequence: Synthetic oligonucleotide
cuuucaagacuaauagauugcuccuuacgaggagacucugcucccugcaggccuag

SEQ ID NO: 866 - RNA, 56 nt, Artificial Sequence
  Description of Artificial Sequence: Synthetic oligonucleotide
cuuucaagacuaauagauugcuccuuacgaggagacucuaggccugcagggagcag

SEQ ID NO: 867 - RNA, 56 nt, Artificial Sequence
  Description of Artificial Sequence: Synthetic oligonucleotide
cuuucaagacuaauagauugcuccuuacgaggagacccugaaacuucucuaggccu

SEQ ID NO: 868 - RNA, 56 nt, Artificial Sequence
  Description of Artificial Sequence: Synthetic oligonucleotide
cuuucaagacuaauagauugcuccuuacgaggagacugaccuucccugaaacuucu

SEQ ID NO: 869 - RNA, 56 nt, Artificial Sequence
  Description of Artificial Sequence: Synthetic oligonucleotide
cuuucaagacuaauagauugcuccuuacgaggagaccagggaaggucagaagagcu

SEQ ID NO: 870 - RNA, 56 nt, Artificial Sequence
  Description of Artificial Sequence: Synthetic oligonucleotide
cuuucaagacuaauagauugcuccuuacgaggagacagggaaggucagaagagcuc

SEQ ID NO: 871 - RNA, 56 nt, Artificial Sequence
  Description of Artificial Sequence: Synthetic oligonucleotide
cuuucaagacuaauagauugcuccuuacgaggagaccugcccugcccaccacagcc

SEQ ID NO: 872 - RNA, 56 nt, Artificial Sequence
  Description of Artificial Sequence: Synthetic oligonucleotide
cuuucaagacuaauagauugcuccuuacgaggagacccugcccugcccaccacagc

SEQ ID NO: 873 - RNA, 56 nt, Artificial Sequence
  Description of Artificial Sequence: Synthetic oligonucleotide
cuuucaagacuaauagauugcuccuuacgaggagacacacaugcccaggcagcacc

SEQ ID NO: 874 - RNA, 56 nt, Artificial Sequence
  Description of Artificial Sequence: Synthetic oligonucleotide
cuuucaagacuaauagauugcuccuuacgaggagaccacaugcccaggcagcaccu

SEQ ID NO: 875 - RNA, 56 nt, Artificial Sequence
  Description of Artificial Sequence: Synthetic oligonucleotide
cuuucaagacuaauagauugcuccuuacgaggagacccugccccacaaagggccug

SEQ ID NO: 876 - RNA, 56 nt, Artificial Sequence
  Description of Artificial Sequence: Synthetic oligonucleotide
cuuucaagacuaauagauugcuccuuacgaggagacguggggcagggaagcugagg

SEQ ID NO: 877 - RNA, 56 nt, Artificial Sequence
  Description of Artificial Sequence: Synthetic oligonucleotide
cuuucaagacuaauagauugcuccuuacgaggagacuggggcagggaagcugaggc

SEQ ID NO: 878 - RNA, 56 nt, Artificial Sequence
  Description of Artificial Sequence: Synthetic oligonucleotide
cuuucaagacuaauagauugcuccuuacgaggagaccugccucagcuucccugccc

SEQ ID NO: 879 - RNA, 56 nt, Artificial Sequence
  Description of Artificial Sequence: Synthetic oligonucleotide
cuuucaagacuaauagauugcuccuuacgaggagaccaggcccagccagcacucug

SEQ ID NO: 880 - RNA, 56 nt, Artificial Sequence
  Description of Artificial Sequence: Synthetic oligonucleotide
cuuucaagacuaauagauugcuccuuacgaggagacaggcccagccagcacucugg

SEQ ID NO: 881 - RNA, 56 nt, Artificial Sequence
  Description of Artificial Sequence: Synthetic oligonucleotide
cuuucaagacuaauagauugcuccuuacgaggagaccaccccagccccucacacca

SEQ ID NO: 882 - RNA, 56 nt, Artificial Sequence
  Description of Artificial Sequence: Synthetic oligonucleotide
cuuucaagacuaauagauugcuccuuacgaggagacggaccguaggaugucccucu

SEQ ID NO: 883 - RNA, 57 nt, Artificial Sequence
  Description of Artificial Sequence: Synthetic oligonucleotide
gcuggggaccgauccugauugcucgcugcggcgagacccuuccgcucaccuccgccu

SEQ ID NO: 884 - RNA, 57 nt, Artificial Sequence; identical to SEQ ID NO: 883
  Description of Artificial Sequence: Synthetic oligonucleotide

SEQ ID NO: 885 - RNA, 57 nt, Artificial Sequence
  Description of Artificial Sequence: Synthetic oligonucleotide
gcuggggaccgauccugauugcucgcugcggcgagaccgcucaccuccgccugagca

SEQ ID NO: 886 - RNA, 57 nt, Artificial Sequence
  Description of Artificial Sequence: Synthetic oligonucleotide
gcuggggaccgauccugauugcucgcugcggcgagacuccacugcucaggcggaggu

SEQ ID NO: 887 - RNA, 57 nt, Artificial Sequence
  Description of Artificial Sequence: Synthetic oligonucleotide
gcuggggaccgauccugauugcucgcugcggcgagacuagcaccgcccagacgacug

SEQ ID NO: 888 - RNA, 57 nt, Artificial Sequence
  Description of Artificial Sequence: Synthetic oligonucleotide
gcuggggaccgauccugauugcucgcugcggcgagacaggcaugcagaucccacagg

SEQ ID NO: 889 - RNA, 57 nt, Artificial Sequence
  Description of Artificial Sequence: Synthetic oligonucleotide
gcuggggaccgauccugauugcucgcugcggcgagaccacaggcgcccuggccaguc

SEQ ID NO: 890 - RNA, 57 nt, Artificial Sequence
  Description of Artificial Sequence: Synthetic oligonucleotide
gcuggggaccgauccugauugcucgcugcggcgagacucugggcggugcuacaacug

SEQ ID NO: 891 - RNA, 57 nt, Artificial Sequence
  Description of Artificial Sequence: Synthetic oligonucleotide
gcuggggaccgauccugauugcucgcugcggcgagacgcaugccuggagcagcccca

SEQ ID NO: 892 - RNA, 57 nt, Artificial Sequence; identical to SEQ ID NO: 887
  Description of Artificial Sequence: Synthetic oligonucleotide

SEQ ID NO: 893 - RNA, 57 nt, Artificial Sequence
  Description of Artificial Sequence: Synthetic oligonucleotide
gcuggggaccgauccugauugcucgcugcggcgagacuggccgccagcccaguugua

SEQ ID NO: 894 - RNA, 57 nt, Artificial Sequence
  Description of Artificial Sequence: Synthetic oligonucleotide
gcuggggaccgauccugauugcucgcugcggcgagaccuuccgcucaccuccgccug

SEQ ID NO: 895 - RNA, 57 nt, Artificial Sequence
  Description of Artificial Sequence: Synthetic oligonucleotide
gcuggggaccgauccugauugcucgcugcggcgagaccagggccugucuggggaguc

SEQ ID NO: 896 - RNA, 57 nt, Artificial Sequence
  Description of Artificial Sequence: Synthetic oligonucleotide
gcuggggaccgauccugauugcucgcugcggcgagacuccccagcccugcucguggu

SEQ ID NO: 897 - RNA, 57 nt, Artificial Sequence
  Description of Artificial Sequence: Synthetic oligonucleotide
gcuggggaccgauccugauugcucgcugcggcgagacggucaccacgagcagggcug

SEQ ID NO: 898 - RNA, 57 nt, Artificial Sequence
  Description of Artificial Sequence: Synthetic oligonucleotide
gcuggggaccgauccugauugcucgcugcggcgagacuccccuucggucaccacgag

SEQ ID NO: 899 - RNA, 57 nt, Artificial Sequence
  Description of Artificial Sequence: Synthetic oligonucleotide
gcuggggaccgauccugauugcucgcugcggcgagacgagaagcugcaggugaaggu

SEQ ID NO: 900 - RNA, 57 nt, Artificial Sequence
  Description of Artificial Sequence: Synthetic oligonucleotide
gcuggggaccgauccugauugcucgcugcggcgagacaccugcagcuucuccaacac

SEQ ID NO: 901 - RNA, 57 nt, Artificial Sequence
  Description of Artificial Sequence: Synthetic oligonucleotide
gcuggggaccgauccugauugcucgcugcggcgagacuccaacacaucggagagcuu

SEQ ID NO: 902 - RNA, 57 nt, Artificial Sequence
  Description of Artificial Sequence: Synthetic oligonucleotide
gcuggggaccgauccugauugcucgcugcggcgagacgcacgaagcucuccgaugug

SEQ ID NO: 903 - RNA, 57 nt, Artificial Sequence
  Description of Artificial Sequence: Synthetic oligonucleotide
gcuggggaccgauccugauugcucgcugcggcgagacagcacgaagcucuccgaugu

SEQ ID NO: 904 - RNA, 57 nt, Artificial Sequence
  Description of Artificial Sequence: Synthetic oligonucleotide
gcuggggaccgauccugauugcucgcugcggcgagacgugcuaaacugguaccgcau

SEQ ID NO: 905 - RNA, 57 nt, Artificial Sequence
  Description of Artificial Sequence: Synthetic oligonucleotide
gcuggggaccgauccugauugcucgcugcggcgagaccuggggcucaugcgguacca

SEQ ID NO: 906 - RNA, 57 nt, Artificial Sequence
  Description of Artificial Sequence: Synthetic oligonucleotide
gcuggggaccgauccugauugcucgcugcggcgagacuccgucugguugcuggggcu

SEQ ID NO: 907 - RNA, 57 nt, Artificial Sequence
  Description of Artificial Sequence: Synthetic oligonucleotide
gcuggggaccgauccugauugcucgcugcggcgagaccccgaggaccgcagccagcc

SEQ ID NO: 908 - RNA, 57 nt, Artificial Sequence
  Description of Artificial Sequence: Synthetic oligonucleotide
gcuggggaccgauccugauugcucgcugcggcgagacugugacacggaagcggcagu

SEQ ID NO: 909 - RNA, 57 nt, Artificial Sequence
  Description of Artificial Sequence: Synthetic oligonucleotide
gcuggggaccgauccugauugcucgcugcggcgagaccgugucacacaacugcccaa

SEQ ID NO: 910 - RNA, 57 nt, Artificial Sequence
  Description of Artificial Sequence: Synthetic oligonucleotide
gcuggggaccgauccugauugcucgcugcggcgagacggcaguugugugacacggaa

SEQ ID NO: 911 - RNA, 57 nt, Artificial Sequence
  Description of Artificial Sequence: Synthetic oligonucleotide
gcuggggaccgauccugauugcucgcugcggcgagaccacaugagcguggucagggc

SEQ ID NO: 912 - RNA, 57 nt, Artificial Sequence
  Description of Artificial Sequence: Synthetic oligonucleotide
gcuggggaccgauccugauugcucgcugcggcgagaccgccgggcccugaccacgcu

SEQ ID NO: 913 - RNA, 57 nt, Artificial Sequence
  Description of Artificial Sequence: Synthetic oligonucleotide
gcuggggaccgauccugauugcucgcugcggcgagacggggccagggagauggcccc

SEQ ID NO: 914 - RNA, 57 nt, Artificial Sequence
  Description of Artificial Sequence: Synthetic oligonucleotide
gcuggggaccgauccugauugcucgcugcggcgagacaucugcgccuugggggccag

SEQ ID NO: 915 - RNA, 57 nt, Artificial Sequence
  Description of Artificial Sequence: Synthetic oligonucleotide
gcuggggaccgauccugauugcucgcugcggcgagacgaucugcgccuugggggcca

SEQ ID NO: 916 - RNA, 57 nt, Artificial Sequence
  Description of Artificial Sequence: Synthetic oligonucleotide
gcuggggaccgauccugauugcucgcugcggcgagacccagacaggcccuggaaccc

SEQ ID NO: 917 - RNA, 57 nt, Artificial Sequence
  Description of Artificial Sequence: Synthetic oligonucleotide
gcuggggaccgauccugauugcucgcugcggcgagacccagcccugcucguggugac

SEQ ID NO: 918 - RNA, 57 nt, Artificial Sequence
  Description of Artificial Sequence: Synthetic oligonucleotide
gcuggggaccgauccugauugcucgcugcggcgagacucucuggaagggcacaaagg

SEQ ID NO: 919 - RNA, 57 nt, Artificial Sequence
  Description of Artificial Sequence: Synthetic oligonucleotide
gcuggggaccgauccugauugcucgcugcggcgagacgugcccuuccagagagaagg

SEQ ID NO: 920 - RNA, 57 nt, Artificial Sequence
  Description of Artificial Sequence: Synthetic oligonucleotide
gcuggggaccgauccugauugcucgcugcggcgagacugcccuuccagagagaaggg

SEQ ID NO: 921 - RNA, 57 nt, Artificial Sequence
  Description of Artificial Sequence: Synthetic oligonucleotide
gcuggggaccgauccugauugcucgcugcggcgagacugcccuucucucuggaaggg

SEQ ID NO: 922 - RNA, 57 nt, Artificial Sequence
  Description of Artificial Sequence: Synthetic oligonucleotide
gcuggggaccgauccugauugcucgcugcggcgagaccagagagaagggcagaagug

SEQ ID NO: 923 - RNA, 57 nt, Artificial Sequence
  Description of Artificial Sequence: Synthetic oligonucleotide
gcuggggaccgauccugauugcucgcugcggcgagacgaacuggccggcuggccugg

SEQ ID NO: 924 - RNA, 57 nt, Artificial Sequence
  Description of Artificial Sequence: Synthetic oligonucleotide
gcuggggaccgauccugauugcucgcugcggcgagacggaacuggccggcuggccug

SEQ ID NO: 925 - RNA, 57 nt, Artificial Sequence
  Description of Artificial Sequence: Synthetic oligonucleotide
gcuggggaccgauccugauugcucgcugcggcgagaccaaacccuggugguuggugu

SEQ ID NO: 926 - RNA, 57 nt, Artificial Sequence
  Description of Artificial Sequence: Synthetic oligonucleotide
gcuggggaccgauccugauugcucgcugcggcgagacgugucgugggcggccugcug

SEQ ID NO: 927 - RNA, 57 nt, Artificial Sequence
  Description of Artificial Sequence: Synthetic oligonucleotide
gcuggggaccgauccugauugcucgcugcggcgagacccucgugcggcccgggagca

SEQ ID NO: 928 - RNA, 57 nt, Artificial Sequence
  Description of Artificial Sequence: Synthetic oligonucleotide
gcuggggaccgauccugauugcucgcugcggcgagacucccugcagagaaacacacu

SEQ ID NO: 929 - RNA, 57 nt, Artificial Sequence
  Description of Artificial Sequence: Synthetic oligonucleotide
gcuggggaccgauccugauugcucgcugcggcgagaccucugcagggacaauaggag

SEQ ID NO: 930 - RNA, 57 nt, Artificial Sequence
  Description of Artificial Sequence: Synthetic oligonucleotide
gcuggggaccgauccugauugcucgcugcggcgagacucugcagggacaauaggagc

SEQ ID NO: 931 - RNA, 57 nt, Artificial Sequence
  Description of Artificial Sequence: Synthetic oligonucleotide
gcuggggaccgauccugauugcucgcugcggcgagaccuccucaaagaaggaggacc

SEQ ID NO: 932 - RNA, 57 nt, Artificial Sequence
  Description of Artificial Sequence: Synthetic oligonucleotide
gcuggggaccgauccugauugcucgcugcggcgagacuccucaaagaaggaggaccc

SEQ ID NO: 933 - RNA, 57 nt, Artificial Sequence
  Description of Artificial Sequence: Synthetic oligonucleotide
gcuggggaccgauccugauugcucgcugcggcgagacucuguggacuauggggagcu

SEQ ID NO: 934 - RNA, 57 nt, Artificial Sequence
  Description of Artificial Sequence: Synthetic oligonucleotide
gcuggggaccgauccugauugcucgcugcggcgagacucucgccacuggaaauccag

SEQ ID NO: 935 - RNA, 57 nt, Artificial Sequence
  Description of Artificial Sequence: Synthetic oligonucleotide
gcuggggaccgauccugauugcucgcugcggcgagacccaguggcgagagaagaccc

SEQ ID NO: 936 - RNA, 57 nt, Artificial Sequence
  Description of Artificial Sequence: Synthetic oligonucleotide
gcuggggaccgauccugauugcucgcugcggcgagaccaguggcgagagaagacccc

SEQ ID NO: 937 - RNA, 57 nt, Artificial Sequence
  Description of Artificial Sequence: Synthetic oligonucleotide
gcuggggaccgauccugauugcucgcugcggcgagaccgcuaggaaagacaauggug

SEQ ID NO: 938 - RNA, 57 nt, Artificial Sequence
  Description of Artificial Sequence: Synthetic oligonucleotide
gcuggggaccgauccugauugcucgcugcggcgagacucuuuccuagcggaaugggc

SEQ ID NO: 939 - RNA, 57 nt, Artificial Sequence
  Description of Artificial Sequence: Synthetic oligonucleotide
gcuggggaccgauccugauugcucgcugcggcgagacccuagcggaaugggcaccuc

SEQ ID NO: 940 - RNA, 57 nt, Artificial Sequence
  Description of Artificial Sequence: Synthetic oligonucleotide
gcuggggaccgauccugauugcucgcugcggcgagaccuagcggaaugggcaccuca

SEQ ID NO: 941 - RNA, 57 nt, Artificial Sequence
  Description of Artificial Sequence: Synthetic oligonucleotide
gcuggggaccgauccugauugcucgcugcggcgagacgccccucugaccggcuuccu

SEQ ID NO: 942 - RNA, 57 nt, Artificial Sequence
  Description of Artificial Sequence: Synthetic oligonucleotide
gcuggggaccgauccugauugcucgcugcggcgagaccuuggccaccaguguucugc

SEQ ID NO: 943 - RNA, 57 nt, Artificial Sequence
  Description of Artificial Sequence: Synthetic oligonucleotide
gcuggggaccgauccugauugcucgcugcggcgagacgccaccaguguucugcagac

SEQ ID NO: 944 - RNA, 57 nt, Artificial Sequence
  Description of Artificial Sequence: Synthetic oligonucleotide
gcuggggaccgauccugauugcucgcugcggcgagacugcagacccuccaccaugag

SEQ ID NO: 945 - RNA, 57 nt, Artificial Sequence
  Description of Artificial Sequence: Synthetic oligonucleotide
gcuggggaccgauccugauugcucgcugcggcgagacuccugaggaaaugcgcugac

SEQ ID NO: 946 - RNA, 57 nt, Artificial Sequence
  Description of Artificial Sequence: Synthetic oligonucleotide
gcuggggaccgauccugauugcucgcugcggcgagacccucaggagaagcaggcagg

SEQ ID NO: 947 - RNA, 57 nt, Artificial Sequence
  Description of Artificial Sequence: Synthetic oligonucleotide
gcuggggaccgauccugauugcucgcugcggcgagaccucaggagaagcaggcaggg

SEQ ID NO: 948 - RNA, 57 nt, Artificial Sequence
  Description of Artificial Sequence: Synthetic oligonucleotide
gcuggggaccgauccugauugcucgcugcggcgagaccaggccguccaggggcugag

SEQ ID NO: 949 - RNA, 57 nt, Artificial Sequence
  Description of Artificial Sequence: Synthetic oligonucleotide
gcuggggaccgauccugauugcucgcugcggcgagacagacaugaguccuguggugg

SEQ ID NO: 950 - RNA, 57 nt, Artificial Sequence
  Description of Artificial Sequence: Synthetic oligonucleotide
gcuggggaccgauccugauugcucgcugcggcgagacagguccugccagcacagagc

SEQ ID NO: 951 - RNA, 57 nt, Artificial Sequence
  Description of Artificial Sequence: Synthetic oligonucleotide
gcuggggaccgauccugauugcucgcugcggcgagacagggagcuggacgcaggcag

SEQ ID NO: 952 - RNA, 57 nt, Artificial Sequence
  Description of Artificial Sequence: Synthetic oligonucleotide
gcuggggaccgauccugauugcucgcugcggcgagacagccccgggccgcaggcagc

SEQ ID NO: 953 - RNA, 57 nt, Artificial Sequence
  Description of Artificial Sequence: Synthetic oligonucleotide
gcuggggaccgauccugauugcucgcugcggcgagacaggcaggaggcuccggggcg

SEQ ID NO: 954 - RNA, 57 nt, Artificial Sequence
  Description of Artificial Sequence: Synthetic oligonucleotide
gcuggggaccgauccugauugcucgcugcggcgagacggggcugguuggagauggcc

SEQ ID NO: 955 - RNA, 57 nt, Artificial Sequence
  Description of Artificial Sequence: Synthetic oligonucleotide
gcuggggaccgauccugauugcucgcugcggcgagacgagauggccuuggagcagcc

SEQ ID NO: 956 - RNA, 57 nt, Artificial Sequence
  Description of Artificial Sequence: Synthetic oligonucleotide
gcuggggaccgauccugauugcucgcugcggcgagacgcugcuccaaggccaucucc

SEQ ID NO: 957 - RNA, 57 nt, Artificial Sequence
  Description of Artificial Sequence: Synthetic oligonucleotide
gcuggggaccgauccugauugcucgcugcggcgagacgagcagccaaggugccccug

SEQ ID NO: 958 - RNA, 57 nt, Artificial Sequence
  Description of Artificial Sequence: Synthetic oligonucleotide
gcuggggaccgauccugauugcucgcugcggcgagacgggaugccacugccaggggc

SEQ ID NO: 959 - RNA, 57 nt, Artificial Sequence
  Description of Artificial Sequence: Synthetic oligonucleotide
gcuggggaccgauccugauugcucgcugcggcgagaccgggaugccacugccagggg

SEQ ID NO: 960 - RNA, 57 nt, Artificial Sequence
  Description of Artificial Sequence: Synthetic oligonucleotide
gcuggggaccgauccugauugcucgcugcggcgagacggcccugcguccagggcguu

SEQ ID NO: 961 - RNA, 57 nt, Artificial Sequence
  Description of Artificial Sequence: Synthetic oligonucleotide
gcuggggaccgauccugauugcucgcugcggcgagacucugcucccugcaggccuag

SEQ ID NO: 962 - RNA, 57 nt, Artificial Sequence
  Description of Artificial Sequence: Synthetic oligonucleotide
gcuggggaccgauccugauugcucgcugcggcgagacucuaggccugcagggagcag

SEQ ID NO: 963 - RNA, 57 nt, Artificial Sequence
  Description of Artificial Sequence: Synthetic oligonucleotide
gcuggggaccgauccugauugcucgcugcggcgagacccugaaacuucucuaggccu

SEQ ID NO: 964 - RNA, 57 nt, Artificial Sequence
  Description of Artificial Sequence: Synthetic oligonucleotide
gcuggggaccgauccugauugcucgcugcggcgagacugaccuucccugaaacuucu

SEQ ID NO: 965 - RNA, 57 nt, Artificial Sequence
  Description of Artificial Sequence: Synthetic oligonucleotide
gcuggggaccgauccugauugcucgcugcggcgagaccagggaaggucagaagagcu

SEQ ID NO: 966 - RNA, 57 nt, Artificial Sequence
  Description of Artificial Sequence: Synthetic oligonucleotide
gcuggggaccgauccugauugcucgcugcggcgagacagggaaggucagaagagcuc

SEQ ID NO: 967 - RNA, 57 nt, Artificial Sequence
  Description of Artificial Sequence: Synthetic oligonucleotide
gcuggggaccgauccugauugcucgcugcggcgagaccugcccugcccaccacagcc

SEQ ID NO: 968 - RNA, 57 nt, Artificial Sequence
  Description of Artificial Sequence: Synthetic oligonucleotide
gcuggggaccgauccugauugcucgcugcggcgagacccugcccugcccaccacagc

SEQ ID NO: 969 - RNA, 57 nt, Artificial Sequence
  Description of Artificial Sequence: Synthetic oligonucleotide
gcuggggaccgauccugauugcucgcugcggcgagacacacaugcccaggcagcacc

SEQ ID NO: 970 - RNA, 57 nt, Artificial Sequence
  Description of Artificial Sequence: Synthetic oligonucleotide
gcuggggaccgauccugauugcucgcugcggcgagaccacaugcccaggcagcaccu

SEQ ID NO: 971 - RNA, 57 nt, Artificial Sequence
  Description of Artificial Sequence: Synthetic oligonucleotide
gcuggggaccgauccugauugcucgcugcggcgagacccugccccacaaagggccug

SEQ ID NO: 972 - RNA, 57 nt, Artificial Sequence
  Description of Artificial Sequence: Synthetic oligonucleotide
gcuggggaccgauccugauugcucgcugcggcgagacguggggcagggaagcugagg

SEQ ID NO: 973 - RNA, 57 nt, Artificial Sequence
  Description of Artificial Sequence: Synthetic oligonucleotide
gcuggggaccgauccugauugcucgcugcggcgagacuggggcagggaagcugaggc

SEQ ID NO: 974 - RNA, 57 nt, Artificial Sequence
  Description of Artificial Sequence: Synthetic oligonucleotide
gcuggggaccgauccugauugcucgcugcggcgagaccugccucagcuucccugccc

SEQ ID NO: 975 - RNA, 57 nt, Artificial Sequence
  Description of Artificial Sequence: Synthetic oligonucleotide
gcuggggaccgauccugauugcucgcugcggcgagaccaggcccagccagcacucug

SEQ ID NO: 976 - RNA, 57 nt, Artificial Sequence
  Description of Artificial Sequence: Synthetic oligonucleotide
gcuggggaccgauccugauugcucgcugcggcgagacaggcccagccagcacucugg

SEQ ID NO: 977 - RNA, 57 nt, Artificial Sequence
  Description of Artificial Sequence: Synthetic oligonucleotide
gcuggggaccgauccugauugcucgcugcggcgagaccaccccagccccucacacca

SEQ ID NO: 978 - RNA, 57 nt, Artificial Sequence
  Description of Artificial Sequence: Synthetic oligonucleotide
gcuggggaccgauccugauugcucgcugcggcgagacggaccguaggaugucccucu

SEQ ID NO: 979 - RNA, 56 nt, Artificial Sequence
  Description of Artificial Sequence: Synthetic oligonucleotide
cuuucaagacuaauagauugcuccuuacgaggagaccuacacaaugcguugccugg

SEQ ID NO: 980 - RNA, 56 nt, Artificial Sequence
  Description of Artificial Sequence: Synthetic oligonucleotide
cuuucaagacuaauagauugcuccuuacgaggagacgggcucugacagguaggacc

SEQ ID NO: 981 - RNA, 56 nt, Artificial Sequence
  Description of Artificial Sequence: Synthetic oligonucleotide
cuuucaagacuaauagauugcuccuuacgaggagacuguaggaaucccagccaggc

SEQ ID NO: 982 - RNA, 56 nt, Artificial Sequence
  Description of Artificial Sequence: Synthetic oligonucleotide
cuuucaagacuaauagauugcuccuuacgaggagacccuggcuccacgcccugcug

SEQ ID NO: 983 - RNA, 56 nt, Artificial Sequence
  Description of Artificial Sequence: Synthetic oligonucleotide
cuuucaagacuaauagauugcuccuuacgaggagacgggaagcugagggcacgagg

SEQ ID NO: 984 - RNA, 56 nt, Artificial Sequence
  Description of Artificial Sequence: Synthetic oligonucleotide
cuuucaagacuaauagauugcuccuuacgaggagacacagcgaugcugacccccug

SEQ ID NO: 985 - RNA, 56 nt, Artificial Sequence
  Description of Artificial Sequence: Synthetic oligonucleotide
cuuucaagacuaauagauugcuccuuacgaggagacuuaacagcgaugcugacccc

SEQ ID NO: 986 - RNA, 56 nt, Artificial Sequence
  Description of Artificial Sequence: Synthetic oligonucleotide
cuuucaagacuaauagauugcuccuuacgaggagacuaugaccagauggaccuggc

SEQ ID NO: 987 - RNA, 56 nt, Artificial Sequence
  Description of Artificial Sequence: Synthetic oligonucleotide
cuuucaagacuaauagauugcuccuuacgaggagacgggccccuagaagguggcua

SEQ ID NO: 988 - RNA, 56 nt, Artificial Sequence
  Description of Artificial Sequence: Synthetic oligonucleotide
cuuucaagacuaauagauugcuccuuacgaggagacuaggggccccaacuccaugg

SEQ ID NO: 989 - RNA, 56 nt, Artificial Sequence
  Description of Artificial Sequence: Synthetic oligonucleotide
cuuucaagacuaauagauugcuccuuacgaggagacagaagcuccagguagccacc

SEQ ID NO: 990 - RNA, 56 nt, Artificial Sequence
  Description of Artificial Sequence: Synthetic oligonucleotide
cuuucaagacuaauagauugcuccuuacgaggagacuccagccagguccaucuggu

SEQ ID NO: 991 - RNA, 56 nt, Artificial Sequence
  Description of Artificial Sequence: Synthetic oligonucleotide
cuuucaagacuaauagauugcuccuuacgaggagacuucuccagccagguccaucu

SEQ ID NO: 992 - RNA, 57 nt, Artificial Sequence
  Description of Artificial Sequence: Synthetic oligonucleotide
gcuggggaccgauccugauugcucgcugcggcgagaccuacacaaugcguugccugg

SEQ ID NO: 993 - RNA, 57 nt, Artificial Sequence
  Description of Artificial Sequence: Synthetic oligonucleotide
gcuggggaccgauccugauugcucgcugcggcgagacgggcucugacagguaggacc

SEQ ID NO: 994 - RNA, 57 nt, Artificial Sequence
  Description of Artificial Sequence: Synthetic oligonucleotide
gcuggggaccgauccugauugcucgcugcggcgagacuguaggaaucccagccaggc

SEQ ID NO: 995 - RNA, 57 nt, Artificial Sequence
  Description of Artificial Sequence: Synthetic oligonucleotide
gcuggggaccgauccugauugcucgcugcggcgagacccuggcuccacgcccugcug

SEQ ID NO: 996 - RNA, 57 nt, Artificial Sequence
  Description of Artificial Sequence: Synthetic oligonucleotide
gcuggggaccgauccugauugcucgcugcggcgagacgggaagcugagggcacgagg

SEQ ID NO: 997 - RNA, 57 nt, Artificial Sequence
  Description of Artificial Sequence: Synthetic oligonucleotide
gcuggggaccgauccugauugcucgcugcggcgagacacagcgaugcugacccccug

SEQ ID NO: 998 - RNA, 57 nt, Artificial Sequence
  Description of Artificial Sequence: Synthetic oligonucleotide
gcuggggaccgauccugauugcucgcugcggcgagacuuaacagcgaugcugacccc

SEQ ID NO: 999 - RNA, 57 nt, Artificial Sequence
  Description of Artificial Sequence: Synthetic oligonucleotide
gcuggggaccgauccugauugcucgcugcggcgagacuaugaccagauggaccuggc

SEQ ID NO: 1000 - RNA, 57 nt, Artificial Sequence
  Description of Artificial Sequence: Synthetic oligonucleotide
gcuggggaccgauccugauugcucgcugcggcgagacgggccccuagaagguggcua

SEQ ID NO: 1001 - RNA, 57 nt, Artificial Sequence
  Description of Artificial Sequence: Synthetic oligonucleotide
gcuggggaccgauccugauugcucgcugcggcgagacuaggggccccaacuccaugg

SEQ ID NO: 1002 - RNA, 57 nt, Artificial Sequence
  Description of Artificial Sequence: Synthetic oligonucleotide
gcuggggaccgauccugauugcucgcugcggcgagacagaagcuccagguagccacc

SEQ ID NO: 1003 - RNA, 57 nt, Artificial Sequence
  Description of Artificial Sequence: Synthetic oligonucleotide
gcuggggaccgauccugauugcucgcugcggcgagacuccagccagguccaucuggu

SEQ ID NO: 1004 - RNA, 57 nt, Artificial Sequence
  Description of Artificial Sequence: Synthetic oligonucleotide
gcuggggaccgauccugauugcucgcugcggcgagacuucuccagccagguccaucu

SEQ ID NO: 1005 - RNA, 56 nt, Artificial Sequence
  Description of Artificial Sequence: Synthetic oligonucleotide
cuuucaagacuaauagauugcuccuuacgaggagacccgcuguugccgccgcugcu

SEQ ID NO: 1006 - RNA, 56 nt, Artificial Sequence
  Description of Artificial Sequence: Synthetic oligonucleotide
cuuucaagacuaauagauugcuccuuacgaggagacccgccgcugcugcugcuguu

SEQ ID NO: 1007 - RNA, 56 nt, Artificial Sequence
  Description of Artificial Sequence: Synthetic oligonucleotide
cuuucaagacuaauagauugcuccuuacgaggagaccugcuacugugccccaccgg

SEQ ID NO: 1008 - RNA, 56 nt, Artificial Sequence
  Description of Artificial Sequence: Synthetic oligonucleotide
cuuucaagacuaauagauugcuccuuacgaggagacauaaucuccauccucguccu

SEQ ID NO: 1009 - RNA, 56 nt, Artificial Sequence
  Description of Artificial Sequence: Synthetic oligonucleotide
cuuucaagacuaauagauugcuccuuacgaggagacugaagagcugaugcucgccc

SEQ ID NO: 1010 - RNA, 56 nt, Artificial Sequence
  Description of Artificial Sequence: Synthetic oligonucleotide
cuuucaagacuaauagauugcuccuuacgaggagacgagcaacggcggaagguggc

SEQ ID NO: 1011 - RNA, 56 nt, Artificial Sequence
  Description of Artificial Sequence: Synthetic oligonucleotide
cuuucaagacuaauagauugcuccuuacgaggagaccuggcagccuccaggccucc

SEQ ID NO: 1012 - RNA, 56 nt, Artificial Sequence
  Description of Artificial Sequence: Synthetic oligonucleotide
cuuucaagacuaauagauugcuccuuacgaggagacuggugcugauggaggagacc

SEQ ID NO: 1013 - RNA, 56 nt, Artificial Sequence
  Description of Artificial Sequence: Synthetic oligonucleotide
cuuucaagacuaauagauugcuccuuacgaggagacaaucuguagccucugggucu

SEQ ID NO: 1014 - RNA, 56 nt, Artificial Sequence
  Description of Artificial Sequence: Synthetic oligonucleotide
cuuucaagacuaauagauugcuccuuacgaggagacuucaaucuguagccucuggg

SEQ ID NO: 1015 - RNA, 56 nt, Artificial Sequence
  Description of Artificial Sequence: Synthetic oligonucleotide
cuuucaagacuaauagauugcuccuuacgaggagacguucaaucuguagccucugg

SEQ ID NO: 1016 - RNA, 56 nt, Artificial Sequence
  Description of Artificial Sequence: Synthetic oligonucleotide
cuuucaagacuaauagauugcuccuuacgaggagacaacaaacugcccaccgccug

SEQ ID NO: 1017 - RNA, 56 nt, Artificial Sequence
  Description of Artificial Sequence: Synthetic oligonucleotide
cuuucaagacuaauagauugcuccuuacgaggagacaugacauagccccggcgggc

SEQ ID NO: 1018 - RNA, 56 nt, Artificial Sequence
  Description of Artificial Sequence: Synthetic oligonucleotide
cuuucaagacuaauagauugcuccuuacgaggagacuacauaucuuuuaugaccuc

SEQ ID NO: 1019 - RNA, 56 nt, Artificial Sequence
  Description of Artificial Sequence: Synthetic oligonucleotide
cuuucaagacuaauagauugcuccuuacgaggagacuaugaccucuucccuggcuu

SEQ ID NO: 1020 - RNA, 56 nt, Artificial Sequence
  Description of Artificial Sequence: Synthetic oligonucleotide
cuuucaagacuaauagauugcuccuuacgaggagacaugaccucuucccuggcuuc

SEQ ID NO: 1021 - RNA, 56 nt, Artificial Sequence
  Description of Artificial Sequence: Synthetic oligonucleotide
cuuucaagacuaauagauugcuccuuacgaggagacugaccucuucccuggcuucu

SEQ ID NO: 1022 - RNA, 56 nt, Artificial Sequence
  Description of Artificial Sequence: Synthetic oligonucleotide
cuuucaagacuaauagauugcuccuuacgaggagacaccaagaagccagggaagag

SEQ ID NO: 1023 - RNA, 56 nt, Artificial Sequence
  Description of Artificial Sequence: Synthetic oligonucleotide
cuuucaagacuaauagauugcuccuuacgaggagacccuggcuucuuggugaagau

SEQ ID NO: 1024 - RNA, 56 nt, Artificial Sequence
  Description of Artificial Sequence: Synthetic oligonucleotide
cuuucaagacuaauagauugcuccuuacgaggagacuuggugaagaugagcaguga

SEQ ID NO: 1025 - RNA, 56 nt, Artificial Sequence
  Description of Artificial Sequence: Synthetic oligonucleotide
cuuucaagacuaauagauugcuccuuacgaggagacgugaagaugagcagugaccu

SEQ ID NO: 1026 - RNA, 56 nt, Artificial Sequence
  Description of Artificial Sequence: Synthetic oligonucleotide
cuuucaagacuaauagauugcuccuuacgaggagacccccauguggaguacauuga

SEQ ID NO: 1027 - RNA, 56 nt, Artificial Sequence
  Description of Artificial Sequence: Synthetic oligonucleotide
cuuucaagacuaauagauugcuccuuacgaggagaccucaauguacuccacauggg

SEQ ID NO: 1028 - RNA, 56 nt, Artificial Sequence
  Description of Artificial Sequence: Synthetic oligonucleotide
cuuucaagacuaauagauugcuccuuacgaggagacaggaagacuccuuugucuuc

SEQ ID NO: 1029 - RNA, 56 nt, Artificial Sequence
  Description of Artificial Sequence: Synthetic oligonucleotide
cuuucaagacuaauagauugcuccuuacgaggagacgucuucgcccagagcauccc

SEQ ID NO: 1030 - RNA, 56 nt, Artificial Sequence
  Description of Artificial Sequence: Synthetic oligonucleotide
cuuucaagacuaauagauugcuccuuacgaggagacucuucgcccagagcauccca

SEQ ID NO: 1031 - RNA, 56 nt, Artificial Sequence
  Description of Artificial Sequence: Synthetic oligonucleotide
cuuucaagacuaauagauugcuccuuacgaggagacgcccagagcaucccauggaa

SEQ ID NO: 1032 - RNA, 56 nt, Artificial Sequence
  Description of Artificial Sequence: Synthetic oligonucleotide
cuuucaagacuaauagauugcuccuuacgaggagaccaugggaugcucugggcgaa

SEQ ID NO: 1033 - RNA, 56 nt, Artificial Sequence
  Description of Artificial Sequence: Synthetic oligonucleotide
cuuucaagacuaauagauugcuccuuacgaggagacgcuccagguuccaugggaug

SEQ ID NO: 1034 - RNA, 56 nt, Artificial Sequence
  Description of Artificial Sequence: Synthetic oligonucleotide
cuuucaagacuaauagauugcuccuuacgaggagacucccagcauggcaccagaca

SEQ ID NO: 1035 - RNA, 56 nt, Artificial Sequence
  Description of Artificial Sequence: Synthetic oligonucleotide
cuuucaagacuaauagauugcuccuuacgaggagaccucugucuggugccaugcug

SEQ ID NO: 1036 - RNA, 56 nt, Artificial Sequence
  Description of Artificial Sequence: Synthetic oligonucleotide
cuuucaagacuaauagauugcuccuuacgaggagacgauaccagcauccagggugc

SEQ ID NO: 1037 - RNA, 56 nt, Artificial Sequence
  Description of Artificial Sequence: Synthetic oligonucleotide
cuuucaagacuaauagauugcuccuuacgaggagacagggcagggucaccaucacc

SEQ ID NO: 1038 - RNA, 56 nt, Artificial Sequence
  Description of Artificial Sequence: Synthetic oligonucleotide
cuuucaagacuaauagauugcuccuuacgaggagacaagucggugauggugacccu

SEQ ID NO: 1039 - RNA, 56 nt, Artificial Sequence
  Description of Artificial Sequence: Synthetic oligonucleotide
cuuucaagacuaauagauugcuccuuacgaggagacaacagcgugccggaggagga

SEQ ID NO: 1040 - RNA, 56 nt, Artificial Sequence
  Description of Artificial Sequence: Synthetic oligonucleotide
cuuucaagacuaauagauugcuccuuacgaggagacgccacaccagcaucccggcc

SEQ ID NO: 1041 - RNA, 56 nt, Artificial Sequence
  Description of Artificial Sequence: Synthetic oligonucleotide
cuuucaagacuaauagauugcuccuuacgaggagacagcacacgcaggcugugcag

SEQ ID NO: 1042 - RNA, 56 nt, Artificial Sequence
  Description of Artificial Sequence: Synthetic oligonucleotide
cuuucaagacuaauagauugcuccuuacgaggagacacaguugagcacacgcaggc

SEQ ID NO: 1043 - RNA, 56 nt, Artificial Sequence
  Description of Artificial Sequence: Synthetic oligonucleotide
cuuucaagacuaauagauugcuccuuacgaggagacccuugacaguugagcacacg

SEQ ID NO: 1044 - RNA, 56 nt, Artificial Sequence
  Description of Artificial Sequence: Synthetic oligonucleotide
cuuucaagacuaauagauugcuccuuacgaggagacgcugacucuuccgaauaaac

SEQ ID NO: 1045 - RNA, 56 nt, Artificial Sequence
  Description of Artificial Sequence: Synthetic oligonucleotide
cuuucaagacuaauagauugcuccuuacgaggagacauucggaagagucagcuaau

SEQ ID NO: 1046 - RNA, 56 nt, Artificial Sequence
  Description of Artificial Sequence: Synthetic oligonucleotide
cuuucaagacuaauagauugcuccuuacgaggagacuucggaagagucagcuaauc

SEQ ID NO: 1047 - RNA, 56 nt, Artificial Sequence
  Description of Artificial Sequence: Synthetic oligonucleotide
cuuucaagacuaauagauugcuccuuacgaggagacggaagagucagcuaauccag

SEQ ID NO: 1048 - RNA, 56 nt, Artificial Sequence
  Description of Artificial Sequence: Synthetic oligonucleotide
cuuucaagacuaauagauugcuccuuacgaggagacugcugccccuggccgguggg

SEQ ID NO: 1049 - RNA, 56 nt, Artificial Sequence
  Description of Artificial Sequence: Synthetic oligonucleotide
cuuucaagacuaauagauugcuccuuacgaggagacaggaugcggcuauacccacc

SEQ ID NO: 1050 - RNA, 56 nt, Artificial Sequence
  Description of Artificial Sequence: Synthetic oligonucleotide
cuuucaagacuaauagauugcuccuuacgaggagacccagcugcugcaaccagcac

SEQ ID NO: 1051 - RNA, 56 nt, Artificial Sequence
  Description of Artificial Sequence: Synthetic oligonucleotide
cuuucaagacuaauagauugcuccuuacgaggagaccagcagcugggaacuuccgg

SEQ ID NO: 1052 - RNA, 56 nt, Artificial Sequence
  Description of Artificial Sequence: Synthetic oligonucleotide
cuuucaagacuaauagauugcuccuuacgaggagaccgggacgacgccugccucua

SEQ ID NO: 1053 - RNA, 56 nt, Artificial Sequence
  Description of Artificial Sequence: Synthetic oligonucleotide
cuuucaagacuaauagauugcuccuuacgaggagacguggccccgacugugaugac

SEQ ID NO: 1054 - RNA, 56 nt, Artificial Sequence
  Description of Artificial Sequence: Synthetic oligonucleotide
cuuucaagacuaauagauugcuccuuacgaggagacccuuggggacuuuggggacu

SEQ ID NO: 1055 - RNA, 56 nt, Artificial Sequence
  Description of Artificial Sequence: Synthetic oligonucleotide
cuuucaagacuaauagauugcuccuuacgaggagacguccccaaaguccccaaggu

SEQ ID NO: 1056 - RNA, 56 nt, Artificial Sequence
  Description of Artificial Sequence: Synthetic oligonucleotide
cuuucaagacuaauagauugcuccuuacgaggagacgggacuuuggggacuaauuu

SEQ ID NO: 1057 - RNA, 56 nt, Artificial Sequence
  Description of Artificial Sequence: Synthetic oligonucleotide
cuuucaagacuaauagauugcuccuuacgaggagacggggacuaauuuuggacgcu

SEQ ID NO: 1058 - RNA, 56 nt, Artificial Sequence
  Description of Artificial Sequence: Synthetic oligonucleotide
cuuucaagacuaauagauugcuccuuacgaggagacgggacuaauuuuggacgcug

SEQ ID NO: 1059 - RNA, 56 nt, Artificial Sequence
  Description of Artificial Sequence: Synthetic oligonucleotide
cuuucaagacuaauagauugcuccuuacgaggagacuggacgcuguguggaucucu

SEQ ID NO: 1060 - RNA, 56 nt, Artificial Sequence
  Description of Artificial Sequence: Synthetic oligonucleotide
cuuucaagacuaauagauugcuccuuacgaggagacggacgcuguguggaucucuu

SEQ ID NO: 1061 - RNA, 56 nt, Artificial Sequence
  Description of Artificial Sequence: Synthetic oligonucleotide
cuuucaagacuaauagauugcuccuuacgaggagacgacgcuguguggaucucuuu

SEQ ID NO: 1062 - RNA, 56 nt, Artificial Sequence
  Description of Artificial Sequence: Synthetic oligonucleotide
cuuucaagacuaauagauugcuccuuacgaggagacccgggggcaaagagauccac

SEQ ID NO: 1063 - RNA, 56 nt, Artificial Sequence
  Description of Artificial Sequence: Synthetic oligonucleotide
cuuucaagacuaauagauugcuccuuacgaggagacgcccccgggaaggacaucau

SEQ ID NO: 1064 - RNA, 56 nt, Artificial Sequence
  Description of Artificial Sequence: Synthetic oligonucleotide
cuuucaagacuaauagauugcuccuuacgaggagaccccccgggaaggacaucauc

SEQ ID NO: 1065 - RNA, 56 nt, Artificial Sequence
  Description of Artificial Sequence: Synthetic oligonucleotide
cuuucaagacuaauagauugcuccuuacgaggagacaugucacagagugggaccuc

SEQ ID NO: 1066 - RNA, 56 nt, Artificial Sequence
  Description of Artificial Sequence: Synthetic oligonucleotide
cuuucaagacuaauagauugcuccuuacgaggagacuggcucggaugcugagccgg

SEQ ID NO: 1067 - RNA, 56 nt, Artificial Sequence
  Description of Artificial Sequence: Synthetic oligonucleotide
cuuucaagacuaauagauugcuccuuacgaggagaccccuggccgagcugcggcag

SEQ ID NO: 1068 - RNA, 56 nt, Artificial Sequence
  Description of Artificial Sequence: Synthetic oligonucleotide
cuuucaagacuaauagauugcuccuuacgaggagacguagagaaguggaucagccu

SEQ ID NO: 1069 - RNA, 56 nt, Artificial Sequence
  Description of Artificial Sequence: Synthetic oligonucleotide
cuuucaagacuaauagauugcuccuuacgaggagacgguagagaaguggaucagcc

SEQ ID NO: 1070 - RNA, 56 nt, Artificial Sequence
  Description of Artificial Sequence: Synthetic oligonucleotide
cuuucaagacuaauagauugcuccuuacgaggagacucuaccaaagacgucaucaa

SEQ ID NO: 1071 - RNA, 56 nt, Artificial Sequence
  Description of Artificial Sequence: Synthetic oligonucleotide
cuuucaagacuaauagauugcuccuuacgaggagacaugacgucuuugguagagaa

SEQ ID NO: 1072 - RNA, 56 nt, Artificial Sequence
  Description of Artificial Sequence: Synthetic oligonucleotide
cuuucaagacuaauagauugcuccuuacgaggagacccugaggaccagcaggugcu

SEQ ID NO: 1073 - RNA, 56 nt, Artificial Sequence
  Description of Artificial Sequence: Synthetic oligonucleotide
cuuucaagacuaauagauugcuccuuacgaggagacggggucagcaccugcugguc

SEQ ID NO: 1074 - RNA, 56 nt, Artificial Sequence
  Description of Artificial Sequence: Synthetic oligonucleotide
cuuucaagacuaauagauugcuccuuacgaggagacgagugggccccgagugugcc

SEQ ID NO: 1075 - RNA, 56 nt, Artificial Sequence
  Description of Artificial Sequence: Synthetic oligonucleotide
cuuucaagacuaauagauugcuccuuacgaggagacuggggcacagcgggcuguag

SEQ ID NO: 1076 - RNA, 56 nt, Artificial Sequence
  Description of Artificial Sequence: Synthetic oligonucleotide
cuuucaagacuaauagauugcuccuuacgaggagacuccaggagcgggaggcgucg

SEQ ID NO: 1077 - RNA, 56 nt, Artificial Sequence
  Description of Artificial Sequence: Synthetic oligonucleotide
cuuucaagacuaauagauugcuccuuacgaggagaccagaccugcuggccuccuau

SEQ ID NO: 1078 - RNA, 56 nt, Artificial Sequence
  Description of Artificial Sequence: Synthetic oligonucleotide
cuuucaagacuaauagauugcuccuuacgaggagacagggccuugcagaccugcug

SEQ ID NO: 1079 - RNA, 56 nt, Artificial Sequence
  Description of Artificial Sequence: Synthetic oligonucleotide
cuuucaagacuaauagauugcuccuuacgaggagacgggggugagggugucuaugc

SEQ ID NO: 1080 - RNA, 56 nt, Artificial Sequence
  Description of Artificial Sequence: Synthetic oligonucleotide
cuuucaagacuaauagauugcuccuuacgaggagacggggugagggugucuaugcc

SEQ ID NO: 1081 - RNA, 56 nt, Artificial Sequence
  Description of Artificial Sequence: Synthetic oligonucleotide
cuuucaagacuaauagauugcuccuuacgaggagacgcacggggaaccaggcagca

SEQ ID NO: 1082 - RNA, 56 nt, Artificial Sequence
  Description of Artificial Sequence: Synthetic oligonucleotide
cuuucaagacuaauagauugcuccuuacgaggagaccccgugccaacugcagcauc

SEQ ID NO: 1083 - RNA, 56 nt, Artificial Sequence
  Description of Artificial Sequence: Synthetic oligonucleotide
cuuucaagacuaauagauugcuccuuacgaggagacuggaugcugcaguuggcacg

SEQ ID NO: 1084 - RNA, 56 nt, Artificial Sequence
  Description of Artificial Sequence: Synthetic oligonucleotide
cuuucaagacuaauagauugcuccuuacgaggagacugguggcaguggacaugggu

SEQ ID NO: 1085 - RNA, 56 nt, Artificial Sequence
  Description of Artificial Sequence: Synthetic oligonucleotide
cuuucaagacuaauagauugcuccuuacgaggagaccacuucccaauggaagcugc

SEQ ID NO: 1086 - RNA, 56 nt, Artificial Sequence
  Description of Artificial Sequence: Synthetic oligonucleotide
cuuucaagacuaauagauugcuccuuacgaggagaccauugggaaguggaagaccu

SEQ ID NO: 1087 - RNA, 56 nt, Artificial Sequence
  Description of Artificial Sequence: Synthetic oligonucleotide
cuuucaagacuaauagauugcuccuuacgaggagacggaaguggaagaccuuagug

SEQ ID NO: 1088 - RNA, 56 nt, Artificial Sequence
  Description of Artificial Sequence: Synthetic oligonucleotide
cuuucaagacuaauagauugcuccuuacgaggagacguguccggaggcagccugcg

SEQ ID NO: 1089 - RNA, 56 nt, Artificial Sequence
  Description of Artificial Sequence: Synthetic oligonucleotide
cuuucaagacuaauagauugcuccuuacgaggagacgccaccaggcggccaguguc

SEQ ID NO: 1090 - RNA, 56 nt, Artificial Sequence
  Description of Artificial Sequence: Synthetic oligonucleotide
cuuucaagacuaauagauugcuccuuacgaggagaccugcugccaugccccagggc

SEQ ID NO: 1091 - RNA, 56 nt, Artificial Sequence
  Description of Artificial Sequence: Synthetic oligonucleotide
cuuucaagacuaauagauugcuccuuacgaggagaccagcccuggggcauggcagc

SEQ ID NO: 1092 - RNA, 56 nt, Artificial Sequence
  Description of Artificial Sequence: Synthetic oligonucleotide
cuuucaagacuaauagauugcuccuuacgaggagaccauuccagcccuggggcaug

SEQ ID NO: 1093 - RNA, 56 nt, Artificial Sequence
  Description of Artificial Sequence: Synthetic oligonucleotide
cuuucaagacuaauagauugcuccuuacgaggagacgcauuccagcccuggggcau

SEQ ID NO: 1094 - RNA, 56 nt, Artificial Sequence
  Description of Artificial Sequence: Synthetic oligonucleotide
cuuucaagacuaauagauugcuccuuacgaggagacugcauuccagcccuggggca

SEQ ID NO: 1095 - RNA, 56 nt, Artificial Sequence
  Description of Artificial Sequence: Synthetic oligonucleotide
cuuucaagacuaauagauugcuccuuacgaggagacauuuugcauuccagcccugg

SEQ ID NO: 1096 - RNA, 56 nt, Artificial Sequence
  Description of Artificial Sequence: Synthetic oligonucleotide
cuuucaagacuaauagauugcuccuuacgaggagaccauccagucaggguccaucc

SEQ ID NO: 1097 - RNA, 56 nt, Artificial Sequence
  Description of Artificial Sequence: Synthetic oligonucleotide
cuuucaagacuaauagauugcuccuuacgaggagacuccacgcuguaggcucccag

SEQ ID NO: 1098 - RNA, 56 nt, Artificial Sequence
  Description of Artificial Sequence: Synthetic oligonucleotide
cuuucaagacuaauagauugcuccuuacgaggagacccacacacagguuguccacg

SEQ ID NO: 1099 - RNA, 56 nt, Artificial Sequence
  Description of Artificial Sequence: Synthetic oligonucleotide
cuuucaagacuaauagauugcuccuuacgaggagacuccacugguccugucugcuc

SEQ ID NO: 1100 - RNA, 56 nt, Artificial Sequence
  Description of Artificial Sequence: Synthetic oligonucleotide
cuuucaagacuaauagauugcuccuuacgaggagaccugaaggccggcuccggcag

SEQ ID NO: 1101 - RNA, 57 nt, Artificial Sequence
  Description of Artificial Sequence: Synthetic oligonucleotide
gcuggggaccgauccugauugcucgcugcggcgagacccgcuguugccgccgcugcu

SEQ ID NO: 1102 - RNA, 57 nt, Artificial Sequence
  Description of Artificial Sequence: Synthetic oligonucleotide
gcuggggaccgauccugauugcucgcugcggcgagacccgccgcugcugcugcuguu

SEQ ID NO: 1103 - RNA, 57 nt, Artificial Sequence
  Description of Artificial Sequence: Synthetic oligonucleotide
gcuggggaccgauccugauugcucgcugcggcgagaccugcuacugugccccaccgg

SEQ ID NO: 1104 - RNA, 57 nt, Artificial Sequence
  Description of Artificial Sequence: Synthetic oligonucleotide
gcuggggaccgauccugauugcucgcugcggcgagacauaaucuccauccucguccu

SEQ ID NO: 1105 - RNA, 57 nt, Artificial Sequence
  Description of Artificial Sequence: Synthetic oligonucleotide
gcuggggaccgauccugauugcucgcugcggcgagacugaagagcugaugcucgccc

SEQ ID NO: 1106 - RNA, 57 nt, Artificial Sequence
  Description of Artificial Sequence: Synthetic oligonucleotide
gcuggggaccgauccugauugcucgcugcggcgagacgagcaacggcggaagguggc

SEQ ID NO: 1107 - RNA, 57 nt, Artificial Sequence
  Description of Artificial Sequence: Synthetic oligonucleotide
gcuggggaccgauccugauugcucgcugcggcgagaccuggcagccuccaggccucc

SEQ ID NO: 1108 - RNA, 57 nt, Artificial Sequence
  Description of Artificial Sequence: Synthetic oligonucleotide
gcuggggaccgauccugauugcucgcugcggcgagacuggugcugauggaggagacc

SEQ ID NO: 1109 - RNA, 57 nt, Artificial Sequence
  Description of Artificial Sequence: Synthetic oligonucleotide
gcuggggaccgauccugauugcucgcugcggcgagacaaucuguagccucugggucu

SEQ ID NO: 1110 - RNA, 57 nt, Artificial Sequence
  Description of Artificial Sequence: Synthetic oligonucleotide
gcuggggaccgauccugauugcucgcugcggcgagacuucaaucuguagccucuggg

SEQ ID NO: 1111 - RNA, 57 nt, Artificial Sequence
  Description of Artificial Sequence: Synthetic oligonucleotide
gcuggggaccgauccugauugcucgcugcggcgagacguucaaucuguagccucugg

SEQ ID NO: 1112 - RNA, 57 nt, Artificial Sequence
  Description of Artificial Sequence: Synthetic oligonucleotide
gcuggggaccgauccugauugcucgcugcggcgagacaacaaacugcccaccgccug

SEQ ID NO: 1113 - RNA, 57 nt, Artificial Sequence
  Description of Artificial Sequence: Synthetic oligonucleotide
gcuggggaccgauccugauugcucgcugcggcgagacaugacauagccccggcgggc

SEQ ID NO: 1114 - RNA, 57 nt, Artificial Sequence
  Description of Artificial Sequence: Synthetic oligonucleotide
gcuggggaccgauccugauugcucgcugcggcgagacuacauaucuuuuaugaccuc

SEQ ID NO: 1115 - RNA, 57 nt, Artificial Sequence
  Description of Artificial Sequence: Synthetic oligonucleotide
gcuggggaccgauccugauugcucgcugcggcgagacuaugaccucuucccuggcuu

SEQ ID NO: 1116 - RNA, 57 nt, Artificial Sequence
  Description of Artificial Sequence: Synthetic oligonucleotide
gcuggggaccgauccugauugcucgcugcggcgagacaugaccucuucccuggcuuc

SEQ ID NO: 1117 - RNA, 57 nt, Artificial Sequence
  Description of Artificial Sequence: Synthetic oligonucleotide
gcuggggaccgauccugauugcucgcugcggcgagacugaccucuucccuggcuucu

SEQ ID NO: 1118 - RNA, 57 nt, Artificial Sequence
  Description of Artificial Sequence: Synthetic oligonucleotide
gcuggggaccgauccugauugcucgcugcggcgagacaccaagaagccagggaagag

SEQ ID NO: 1119 - RNA, 57 nt, Artificial Sequence
  Description of Artificial Sequence: Synthetic oligonucleotide
gcuggggaccgauccugauugcucgcugcggcgagacccuggcuucuuggugaagau

SEQ ID NO: 1120 - RNA, 57 nt, Artificial Sequence
  Description of Artificial Sequence: Synthetic oligonucleotide
gcuggggaccgauccugauugcucgcugcggcgagacuuggugaagaugagcaguga

SEQ ID NO: 1121 - RNA, 57 nt, Artificial Sequence
  Description of Artificial Sequence: Synthetic oligonucleotide
gcuggggaccgauccugauugcucgcugcggcgagacgugaagaugagcagugaccu

SEQ ID NO: 1122 - RNA, 57 nt, Artificial Sequence
  Description of Artificial Sequence: Synthetic oligonucleotide
gcuggggaccgauccugauugcucgcugcggcgagacccccauguggaguacauuga

SEQ ID NO: 1123 - RNA, 57 nt, Artificial Sequence
  Description of Artificial Sequence: Synthetic oligonucleotide
gcuggggaccgauccugauugcucgcugcggcgagaccucaauguacuccacauggg

SEQ ID NO: 1124 - RNA, 57 nt, Artificial Sequence
  Description of Artificial Sequence: Synthetic oligonucleotide
gcuggggaccgauccugauugcucgcugcggcgagacaggaagacuccuuugucuuc

SEQ ID NO: 1125 - RNA, 57 nt, Artificial Sequence
  Description of Artificial Sequence: Synthetic oligonucleotide
gcuggggaccgauccugauugcucgcugcggcgagacgucuucgcccagagcauccc

SEQ ID NO: 1126 - RNA, 57 nt, Artificial Sequence
  Description of Artificial Sequence: Synthetic oligonucleotide
gcuggggaccgauccugauugcucgcugcggcgagacucuucgcccagagcauccca

SEQ ID NO: 1127 - RNA, 57 nt, Artificial Sequence
  Description of Artificial Sequence: Synthetic oligonucleotide
gcuggggaccgauccugauugcucgcugcggcgagacgcccagagcaucccauggaa

SEQ ID NO: 1128 - RNA, 57 nt, Artificial Sequence
  Description of Artificial Sequence: Synthetic oligonucleotide
gcuggggaccgauccugauugcucgcugcggcgagaccaugggaugcucugggcgaa

SEQ ID NO: 1129 - RNA, 57 nt, Artificial Sequence
  Description of Artificial Sequence: Synthetic oligonucleotide
gcuggggaccgauccugauugcucgcugcggcgagacgcuccagguuccaugggaug

SEQ ID NO: 1130 - RNA, 57 nt, Artificial Sequence
  Description of Artificial Sequence: Synthetic oligonucleotide
gcuggggaccgauccugauugcucgcugcggcgagacucccagcauggcaccagaca

SEQ ID NO: 1131 - RNA, 57 nt, Artificial Sequence
  Description of Artificial Sequence: Synthetic oligonucleotide
gcuggggaccgauccugauugcucgcugcggcgagaccucugucuggugccaugcug

SEQ ID NO: 1132 - RNA, 57 nt, Artificial Sequence
  Description of Artificial Sequence: Synthetic oligonucleotide
gcuggggaccgauccugauugcucgcugcggcgagacgauaccagcauccagggugc

SEQ ID NO: 1133 - RNA, 57 nt, Artificial Sequence
  Description of Artificial Sequence: Synthetic oligonucleotide
gcuggggaccgauccugauugcucgcugcggcgagacagggcagggucaccaucacc

SEQ ID NO: 1134 - RNA, 57 nt, Artificial Sequence
  Description of Artificial Sequence: Synthetic oligonucleotide
gcuggggaccgauccugauugcucgcugcggcgagacaagucggugauggugacccu

SEQ ID NO: 1135 - RNA, 57 nt, Artificial Sequence
  Description of Artificial Sequence: Synthetic oligonucleotide
gcuggggaccgauccugauugcucgcugcggcgagacaacagcgugccggaggagga

SEQ ID NO: 1136 - RNA, 57 nt, Artificial Sequence
  Description of Artificial Sequence: Synthetic oligonucleotide
gcuggggaccgauccugauugcucgcugcggcgagacgccacaccagcaucccggcc

SEQ ID NO: 1137 - RNA, 57 nt, Artificial Sequence
  Description of Artificial Sequence: Synthetic oligonucleotide
gcuggggaccgauccugauugcucgcugcggcgagacagcacacgcaggcugugcag

SEQ ID NO: 1138 - RNA, 57 nt, Artificial Sequence
  Description of Artificial Sequence: Synthetic oligonucleotide
gcuggggaccgauccugauugcucgcugcggcgagacacaguugagcacacgcaggc

SEQ ID NO: 1139 - RNA, 57 nt, Artificial Sequence
  Description of Artificial Sequence: Synthetic oligonucleotide
gcuggggaccgauccugauugcucgcugcggcgagacccuugacaguugagcacacg

SEQ ID NO: 1140 - RNA, 57 nt, Artificial Sequence
  Description of Artificial Sequence: Synthetic oligonucleotide
gcuggggaccgauccugauugcucgcugcggcgagacgcugacucuuccgaauaaac

SEQ ID NO: 1141 - RNA, 57 nt, Artificial Sequence
  Description of Artificial Sequence: Synthetic oligonucleotide
gcuggggaccgauccugauugcucgcugcggcgagacauucggaagagucagcuaau

SEQ ID NO: 1142 - RNA, 57 nt, Artificial Sequence
  Description of Artificial Sequence: Synthetic oligonucleotide
gcuggggaccgauccugauugcucgcugcggcgagacuucggaagagucagcuaauc

SEQ ID NO: 1143 - RNA, 57 nt, Artificial Sequence
  Description of Artificial Sequence: Synthetic oligonucleotide
gcuggggaccgauccugauugcucgcugcggcgagacggaagagucagcuaauccag

SEQ ID NO: 1144 - RNA, 57 nt, Artificial Sequence
  Description of Artificial Sequence: Synthetic oligonucleotide
gcuggggaccgauccugauugcucgcugcggcgagacugcugccccuggccgguggg

SEQ ID NO: 1145 - RNA, 57 nt, Artificial Sequence
  Description of Artificial Sequence: Synthetic oligonucleotide
gcuggggaccgauccugauugcucgcugcggcgagacaggaugcggcuauacccacc

SEQ ID NO: 1146 - RNA, 57 nt, Artificial Sequence
  Description of Artificial Sequence: Synthetic oligonucleotide
gcuggggaccgauccugauugcucgcugcggcgagacccagcugcugcaaccagcac

SEQ ID NO: 1147 - RNA, 57 nt, Artificial Sequence
  Description of Artificial Sequence: Synthetic oligonucleotide
gcuggggaccgauccugauugcucgcugcggcgagaccagcagcugggaacuuccgg

SEQ ID NO: 1148 - RNA, 57 nt, Artificial Sequence
  Description of Artificial Sequence: Synthetic oligonucleotide
gcuggggaccgauccugauugcucgcugcggcgagaccgggacgacgccugccucua

SEQ ID NO: 1149 - RNA, 57 nt, Artificial Sequence
  Description of Artificial Sequence: Synthetic oligonucleotide
gcuggggaccgauccugauugcucgcugcggcgagacguggccccgacugugaugac

SEQ ID NO: 1150 - RNA, 57 nt, Artificial Sequence
  Description of Artificial Sequence: Synthetic oligonucleotide
gcuggggaccgauccugauugcucgcugcggcgagacccuuggggacuuuggggacu

SEQ ID NO: 1151 - RNA, 57 nt, Artificial Sequence
  Description of Artificial Sequence: Synthetic oligonucleotide
gcuggggaccgauccugauugcucgcugcggcgagacguccccaaaguccccaaggu

SEQ ID NO: 1152 - RNA, 57 nt, Artificial Sequence
  Description of Artificial Sequence: Synthetic oligonucleotide
gcuggggaccgauccugauugcucgcugcggcgagacgggacuuuggggacuaauuu

SEQ ID NO: 1153 - RNA, 57 nt, Artificial Sequence
  Description of Artificial Sequence: Synthetic oligonucleotide
gcuggggaccgauccugauugcucgcugcggcgagacggggacuaauuuuggacgcu

SEQ ID NO: 1154 - RNA, 57 nt, Artificial Sequence
  Description of Artificial Sequence: Synthetic oligonucleotide
gcuggggaccgauccugauugcucgcugcggcgagacgggacuaauuuuggacgcug

SEQ ID NO: 1155 - RNA, 57 nt, Artificial Sequence
  Description of Artificial Sequence: Synthetic oligonucleotide
gcuggggaccgauccugauugcucgcugcggcgagacuggacgcuguguggaucucu

SEQ ID NO: 1156 - RNA, 57 nt, Artificial Sequence
  Description of Artificial Sequence: Synthetic oligonucleotide
gcuggggaccgauccugauugcucgcugcggcgagacggacgcuguguggaucucuu

SEQ ID NO: 1157 - RNA, 57 nt, Artificial Sequence
  Description of Artificial Sequence: Synthetic oligonucleotide
gcuggggaccgauccugauugcucgcugcggcgagacgacgcuguguggaucucuuu

SEQ ID NO: 1158 - RNA, 57 nt, Artificial Sequence
  Description of Artificial Sequence: Synthetic oligonucleotide
gcuggggaccgauccugauugcucgcugcggcgagacccgggggcaaagagauccac

SEQ ID NO: 1159 - RNA, 57 nt, Artificial Sequence
  Description of Artificial Sequence: Synthetic oligonucleotide
gcuggggaccgauccugauugcucgcugcggcgagacgcccccgggaaggacaucau

SEQ ID NO: 1160 - RNA, 57 nt, Artificial Sequence
  Description of Artificial Sequence: Synthetic oligonucleotide
gcuggggaccgauccugauugcucgcugcggcgagaccccccgggaaggacaucauc

SEQ ID NO: 1161 - RNA, 57 nt, Artificial Sequence
  Description of Artificial Sequence: Synthetic oligonucleotide
gcuggggaccgauccugauugcucgcugcggcgagacaugucacagagugggaccuc

SEQ ID NO: 1162 - RNA, 57 nt, Artificial Sequence
  Description of Artificial Sequence: Synthetic oligonucleotide
gcuggggaccgauccugauugcucgcugcggcgagacuggcucggaugcugagccgg

SEQ ID NO: 1163 - RNA, 57 nt, Artificial Sequence
  Description of Artificial Sequence: Synthetic oligonucleotide
gcuggggaccgauccugauugcucgcugcggcgagaccccuggccgagcugcggcag

SEQ ID NO: 1164 - RNA, 57 nt, Artificial Sequence
  Description of Artificial Sequence: Synthetic oligonucleotide
gcuggggaccgauccugauugcucgcugcggcgagacguagagaaguggaucagccu

SEQ ID NO: 1165 - RNA, 57 nt, Artificial Sequence
  Description of Artificial Sequence: Synthetic oligonucleotide
gcuggggaccgauccugauugcucgcugcggcgagacgguagagaaguggaucagcc

SEQ ID NO: 1166 - RNA, 57 nt, Artificial Sequence
  Description of Artificial Sequence: Synthetic oligonucleotide
gcuggggaccgauccugauugcucgcugcggcgagacucuaccaaagacgucaucaa

SEQ ID NO: 1167 - RNA, 57 nt, Artificial Sequence
  Description of Artificial Sequence: Synthetic oligonucleotide
gcuggggaccgauccugauugcucgcugcggcgagacaugacgucuuugguagagaa

SEQ ID NO: 1168 - RNA, 57 nt, Artificial Sequence
  Description of Artificial Sequence: Synthetic oligonucleotide
gcuggggaccgauccugauugcucgcugcggcgagacccugaggaccagcaggugcu

SEQ ID NO: 1169 - RNA, 57 nt, Artificial Sequence
  Description of Artificial Sequence: Synthetic oligonucleotide
gcuggggaccgauccugauugcucgcugcggcgagacggggucagcaccugcugguc

SEQ ID NO: 1170 - RNA, 57 nt, Artificial Sequence
  Description of Artificial Sequence: Synthetic oligonucleotide
gcuggggaccgauccugauugcucgcugcggcgagacgagugggccccgagugugcc

SEQ ID NO: 1171 - RNA, 57 nt, Artificial Sequence
  Description of Artificial Sequence: Synthetic oligonucleotide
gcuggggaccgauccugauugcucgcugcggcgagacuggggcacagcgggcuguag

SEQ ID NO: 1172 - RNA, 57 nt, Artificial Sequence
  Description of Artificial Sequence: Synthetic oligonucleotide
gcuggggaccgauccugauugcucgcugcggcgagacuccaggagcgggaggcgucg

SEQ ID NO: 1173 - RNA, 57 nt, Artificial Sequence
  Description of Artificial Sequence: Synthetic oligonucleotide
gcuggggaccgauccugauugcucgcugcggcgagaccagaccugcuggccuccuau

SEQ ID NO: 1174 - RNA, 57 nt, Artificial Sequence
  Description of Artificial Sequence: Synthetic oligonucleotide
gcuggggaccgauccugauugcucgcugcggcgagacagggccuugcagaccugcug

SEQ ID NO: 1175 - RNA, 57 nt, Artificial Sequence
  Description of Artificial Sequence: Synthetic oligonucleotide
gcuggggaccgauccugauugcucgcugcggcgagacgggggugagggugucuaugc

SEQ ID NO: 1176 - RNA, 57 nt, Artificial Sequence
  Description of Artificial Sequence: Synthetic oligonucleotide
gcuggggaccgauccugauugcucgcugcggcgagacggggugagggugucuaugcc

SEQ ID NO: 1177 - RNA, 57 nt, Artificial Sequence
  Description of Artificial Sequence: Synthetic oligonucleotide
gcuggggaccgauccugauugcucgcugcggcgagacgcacggggaaccaggcagca

SEQ ID NO: 1178 - RNA, 57 nt, Artificial Sequence
  Description of Artificial Sequence: Synthetic oligonucleotide
gcuggggaccgauccugauugcucgcugcggcgagaccccgugccaacugcagcauc

SEQ ID NO: 1179 - RNA, 57 nt, Artificial Sequence
  Description of Artificial Sequence: Synthetic oligonucleotide
gcuggggaccgauccugauugcucgcugcggcgagacuggaugcugcaguuggcacg

SEQ ID NO: 1180 - RNA, 57 nt, Artificial Sequence
  Description of Artificial Sequence: Synthetic oligonucleotide
gcuggggaccgauccugauugcucgcugcggcgagacugguggcaguggacaugggu

SEQ ID NO: 1181 - RNA, 57 nt, Artificial Sequence
  Description of Artificial Sequence: Synthetic oligonucleotide
gcuggggaccgauccugauugcucgcugcggcgagaccacuucccaauggaagcugc

SEQ ID NO: 1182 - RNA, 57 nt, Artificial Sequence
  Description of Artificial Sequence: Synthetic oligonucleotide
gcuggggaccgauccugauugcucgcugcggcgagaccauugggaaguggaagaccu

SEQ ID NO: 1183 - RNA, 57 nt, Artificial Sequence
  Description of Artificial Sequence: Synthetic oligonucleotide
gcuggggaccgauccugauugcucgcugcggcgagacggaaguggaagaccuuagug

SEQ ID NO: 1184 - RNA, 57 nt, Artificial Sequence
  Description of Artificial Sequence: Synthetic oligonucleotide
gcuggggaccgauccugauugcucgcugcggcgagacguguccggaggcagccugcg

SEQ ID NO: 1185 - RNA, 57 nt, Artificial Sequence
  Description of Artificial Sequence: Synthetic oligonucleotide
gcuggggaccgauccugauugcucgcugcggcgagacgccaccaggcggccaguguc

SEQ ID NO: 1186 - RNA, 57 nt, Artificial Sequence
  Description of Artificial Sequence: Synthetic oligonucleotide
gcuggggaccgauccugauugcucgcugcggcgagaccugcugccaugccccagggc

SEQ ID NO: 1187 - RNA, 57 nt, Artificial Sequence
  Description of Artificial Sequence: Synthetic oligonucleotide
gcuggggaccgauccugauugcucgcugcggcgagaccagcccuggggcauggcagc

SEQ ID NO: 1188 - RNA, 57 nt, Artificial Sequence
  Description of Artificial Sequence: Synthetic oligonucleotide
gcuggggaccgauccugauugcucgcugcggcgagaccauuccagcccuggggcaug

SEQ ID NO: 1189 - RNA, 57 nt, Artificial Sequence
  Description of Artificial Sequence: Synthetic oligonucleotide
gcuggggaccgauccugauugcucgcugcggcgagacgcauuccagcccuggggcau

SEQ ID NO: 1190 - RNA, 57 nt, Artificial Sequence
  Description of Artificial Sequence: Synthetic oligonucleotide
gcuggggaccgauccugauugcucgcugcggcgagacugcauuccagcccuggggca

SEQ ID NO: 1191 - RNA, 57 nt, Artificial Sequence
  Description of Artificial Sequence: Synthetic oligonucleotide
gcuggggaccgauccugauugcucgcugcggcgagacauuuugcauuccagcccugg

SEQ ID NO: 1192 - RNA, 57 nt, Artificial Sequence
  Description of Artificial Sequence: Synthetic oligonucleotide
gcuggggaccgauccugauugcucgcugcggcgagaccauccagucaggguccaucc

SEQ ID NO: 1193 - RNA, 57 nt, Artificial Sequence
  Description of Artificial Sequence: Synthetic oligonucleotide
gcuggggaccgauccugauugcucgcugcggcgagacuccacgcuguaggcucccag

SEQ ID NO: 1194 - RNA, 57 nt, Artificial Sequence
  Description of Artificial Sequence: Synthetic oligonucleotide
gcuggggaccgauccugauugcucgcugcggcgagacccacacacagguuguccacg

SEQ ID NO: 1195 - RNA, 57 nt, Artificial Sequence
  Description of Artificial Sequence: Synthetic oligonucleotide
gcuggggaccgauccugauugcucgcugcggcgagacuccacugguccugucugcuc

SEQ ID NO: 1196 - RNA, 57 nt, Artificial Sequence
  Description of Artificial Sequence: Synthetic oligonucleotide
gcuggggaccgauccugauugcucgcugcggcgagaccugaaggccggcuccggcag

SEQ ID NO: 1197 - DNA, 56 bp, Artificial Sequence
  Description of Artificial Sequence: Synthetic oligonucleotide
ctttcaagactaatagattgctccttacgaggagacgaagctatgttttccatctc

SEQ ID NO: 1198 - DNA, 56 bp, Artificial Sequence
  Description of Artificial Sequence: Synthetic oligonucleotide
ctttcaagactaatagattgctccttacgaggagacgcaggggcagccgccccctg

SEQ ID NO: 1199 - DNA, 56 bp, Artificial Sequence
  Description of Artificial Sequence: Synthetic oligonucleotide
ctttcaagactaatagattgctccttacgaggagacctcctagaacccaacaggta

SEQ ID NO: 1200 - DNA, 56 bp, Artificial Sequence
  Description of Artificial Sequence: Synthetic oligonucleotide
ctttcaagactaatagattgctccttacgaggagacgaaagacctcctctgtgtcc

SEQ ID NO: 1201 - DNA, 56 bp, Artificial Sequence
  Description of Artificial Sequence: Synthetic oligonucleotide
ctttcaagactaatagattgctccttacgaggagactccatctcggggttggcagg

SEQ ID NO: 1202 - DNA, 56 bp, Artificial Sequence
  Description of Artificial Sequence: Synthetic oligonucleotide
ctttcaagactaatagattgctccttacgaggagacttcctgatggtggagatgga

SEQ ID NO: 1203 - DNA, 56 bp, Artificial Sequence
  Description of Artificial Sequence: Synthetic oligonucleotide
ctttcaagactaatagattgctccttacgaggagacctgactcccagctctgaccc

SEQ ID NO: 1204 - DNA, 56 bp, Artificial Sequence
  Description of Artificial Sequence: Synthetic oligonucleotide
ctttcaagactaatagattgctccttacgaggagactggggtcagagctgggagtc

SEQ ID NO: 1205 - DNA, 56 bp, Artificial Sequence; identical to SEQ ID NO: 1200
  Description of Artificial Sequence: Synthetic oligonucleotide

SEQ ID NO: 1206 - DNA, 56 bp, Artificial Sequence
  Description of Artificial Sequence: Synthetic oligonucleotide
ctttcaagactaatagattgctccttacgaggagaccgaagctatgttttccatct

SEQ ID NO: 1207 - DNA, 56 bp, Artificial Sequence; identical to SEQ ID NO: 1197
  Description of Artificial Sequence: Synthetic oligonucleotide

SEQ ID NO: 1208 - DNA, 56 bp, Artificial Sequence
  Description of Artificial Sequence: Synthetic oligonucleotide
ctttcaagactaatagattgctccttacgaggagactccatctccaccatcaggaa

SEQ ID NO: 1209 - DNA, 56 bp, Artificial Sequence
  Description of Artificial Sequence: Synthetic oligonucleotide
ctttcaagactaatagattgctccttacgaggagacccatctccaccatcaggaac

SEQ ID NO: 1210 - DNA, 56 bp, Artificial Sequence
  Description of Artificial Sequence: Synthetic oligonucleotide
ctttcaagactaatagattgctccttacgaggagacctgatggtggagatggaaaa

SEQ ID NO: 1211 - DNA, 56 bp, Artificial Sequence
  Description of Artificial Sequence: Synthetic oligonucleotide
ctttcaagactaatagattgctccttacgaggagaccatctccaccatcaggaaca

SEQ ID NO: 1212 - DNA, 56 bp, Artificial Sequence; identical to SEQ ID NO: 1202
  Description of Artificial Sequence: Synthetic oligonucleotide

SEQ ID NO: 1213 - DNA, 56 bp, Artificial Sequence; identical to SEQ ID NO: 1198
  Description of Artificial Sequence: Synthetic oligonucleotide

SEQ ID NO: 1214 - DNA, 56 bp, Artificial Sequence; identical to SEQ ID NO: 1201
  Description of Artificial Sequence: Synthetic oligonucleotide

SEQ ID NO: 1215 - DNA, 56 bp, Artificial Sequence
  Description of Artificial Sequence: Synthetic oligonucleotide
ctttcaagactaatagattgctccttacgaggagactaggagcaaattgtccatct

SEQ ID NO: 1216 - DNA, 56 bp, Artificial Sequence
  Description of Artificial Sequence: Synthetic oligonucleotide
ctttcaagactaatagattgctccttacgaggagacggttctaggagcaaattgtc

SEQ ID NO: 1217 - DNA, 56 bp, Artificial Sequence
  Description of Artificial Sequence: Synthetic oligonucleotide
ctttcaagactaatagattgctccttacgaggagacgctcctagaacccaacaggt

SEQ ID NO: 1218 - DNA, 56 bp, Artificial Sequence; identical to SEQ ID NO: 1199
  Description of Artificial Sequence: Synthetic oligonucleotide

SEQ ID NO: 1219 - DNA, 56 bp, Artificial Sequence
  Description of Artificial Sequence: Synthetic oligonucleotide
ctttcaagactaatagattgctccttacgaggagactccagacgccatctttcagg

SEQ ID NO: 1220 - DNA, 56 bp, Artificial Sequence
  Description of Artificial Sequence: Synthetic oligonucleotide
ctttcaagactaatagattgctccttacgaggagactggtaagagtcctcctgccc

SEQ ID NO: 1221 - DNA, 56 bp, Artificial Sequence
  Description of Artificial Sequence: Synthetic oligonucleotide
ctttcaagactaatagattgctccttacgaggagacttacagcatcttgggtcagg

SEQ ID NO: 1222 - DNA, 56 bp, Artificial Sequence
  Description of Artificial Sequence: Synthetic oligonucleotide
ctttcaagactaatagattgctccttacgaggagacggtcaggtgggccggcagct

SEQ ID NO: 1223 - DNA, 56 bp, Artificial Sequence
  Description of Artificial Sequence: Synthetic oligonucleotide
ctttcaagactaatagattgctccttacgaggagacctatcattggagatgacatt

SEQ ID NO: 1224 - DNA, 56 bp, Artificial Sequence
  Description of Artificial Sequence: Synthetic oligonucleotide
ctttcaagactaatagattgctccttacgaggagacgagatgacattaaccggaga

SEQ ID NO: 1225 - DNA, 56 bp, Artificial Sequence
  Description of Artificial Sequence: Synthetic oligonucleotide
ctttcaagactaatagattgctccttacgaggagactggaactctgtgtcgtatct

SEQ ID NO: 1226 - DNA, 56 bp, Artificial Sequence
  Description of Artificial Sequence: Synthetic oligonucleotide
ctttcaagactaatagattgctccttacgaggagaccagaatttactggagcagct

SEQ ID NO: 1227 - DNA, 56 bp, Artificial Sequence
  Description of Artificial Sequence: Synthetic oligonucleotide
ctttcaagactaatagattgctccttacgaggagacactggagcagctgcagccca

SEQ ID NO: 1228 - DNA, 56 bp, Artificial Sequence
  Description of Artificial Sequence: Synthetic oligonucleotide
ctttcaagactaatagattgctccttacgaggagacccagctgtgggctgcagctg

SEQ ID NO: 1229 - DNA, 56 bp, Artificial Sequence
  Description of Artificial Sequence: Synthetic oligonucleotide
ctttcaagactaatagattgctccttacgaggagacgtaggcattcccagctgtgg

SEQ ID NO: 1230 - DNA, 56 bp, Artificial Sequence
  Description of Artificial Sequence: Synthetic oligonucleotide
ctttcaagactaatagattgctccttacgaggagacgtgaagagttcgtaggcatt

SEQ ID NO: 1231 - DNA, 56 bp, Artificial Sequence
  Description of Artificial Sequence: Synthetic oligonucleotide
ctttcaagactaatagattgctccttacgaggagacaccaagattgcctccaggta

SEQ ID NO: 1232 - DNA, 56 bp, Artificial Sequence
  Description of Artificial Sequence: Synthetic oligonucleotide
ctttcaagactaatagattgctccttacgaggagaccctccaggtacccaccacca

SEQ ID NO: 1233 - DNA, 57 bp, Artificial Sequence
  Description of Artificial Sequence: Synthetic oligonucleotide
gctggggaccgatcctgattgctcgctgcggcgagacgaagctatgttttccatctc

SEQ ID NO: 1234 - DNA, 57 bp, Artificial Sequence
  Description of Artificial Sequence: Synthetic oligonucleotide
gctggggaccgatcctgattgctcgctgcggcgagacgcaggggcagccgccccctg

SEQ ID NO: 1235 - DNA, 57 bp, Artificial Sequence
  Description of Artificial Sequence: Synthetic oligonucleotide
gctggggaccgatcctgattgctcgctgcggcgagacctcctagaacccaacaggta

SEQ ID NO: 1236 - DNA, 57 bp, Artificial Sequence
  Description of Artificial Sequence: Synthetic oligonucleotide
gctggggaccgatcctgattgctcgctgcggcgagacgaaagacctcctctgtgtcc

SEQ ID NO: 1237 - DNA, 57 bp, Artificial Sequence
  Description of Artificial Sequence: Synthetic oligonucleotide
gctggggaccgatcctgattgctcgctgcggcgagactccatctcggggttggcagg

SEQ ID NO: 1238 - DNA, 57 bp, Artificial Sequence
  Description of Artificial Sequence: Synthetic oligonucleotide
gctggggaccgatcctgattgctcgctgcggcgagacttcctgatggtggagatgga

SEQ ID NO: 1239 - DNA, 57 bp, Artificial Sequence
  Description of Artificial Sequence: Synthetic oligonucleotide
gctggggaccgatcctgattgctcgctgcggcgagacctgactcccagctctgaccc

SEQ ID NO: 1240 - DNA, 57 bp, Artificial Sequence
  Description of Artificial Sequence: Synthetic oligonucleotide
gctggggaccgatcctgattgctcgctgcggcgagactggggtcagagctgggagtc

SEQ ID NO: 1241 - DNA, 57 bp, Artificial Sequence; identical to SEQ ID NO: 1236
  Description of Artificial Sequence: Synthetic oligonucleotide

SEQ ID NO: 1242 - DNA, 57 bp, Artificial Sequence
  Description of Artificial Sequence: Synthetic oligonucleotide
gctggggaccgatcctgattgctcgctgcggcgagaccgaagctatgttttccatct

SEQ ID NO: 1243 - DNA, 57 bp, Artificial Sequence; identical to SEQ ID NO: 1233
  Description of Artificial Sequence: Synthetic oligonucleotide

SEQ ID NO: 1244 - DNA, 57 bp, Artificial Sequence
  Description of Artificial Sequence: Synthetic oligonucleotide
gctggggaccgatcctgattgctcgctgcggcgagactccatctccaccatcaggaa

SEQ ID NO: 1245 - DNA, 57 bp, Artificial Sequence
  Description of Artificial Sequence: Synthetic oligonucleotide
gctggggaccgatcctgattgctcgctgcggcgagacccatctccaccatcaggaac

SEQ ID NO: 1246 - DNA, 57 bp, Artificial Sequence
  Description of Artificial Sequence: Synthetic oligonucleotide
gctggggaccgatcctgattgctcgctgcggcgagacctgatggtggagatggaaaa

SEQ ID NO: 1247 - DNA, 57 bp, Artificial Sequence
  Description of Artificial Sequence: Synthetic oligonucleotide
gctggggaccgatcctgattgctcgctgcggcgagaccatctccaccatcaggaaca

SEQ ID NO: 1248 - DNA, 57 bp, Artificial Sequence; identical to SEQ ID NO: 1238
  Description of Artificial Sequence: Synthetic oligonucleotide

SEQ ID NO: 1249 - DNA, 57 bp, Artificial Sequence; identical to SEQ ID NO: 1234
  Description of Artificial Sequence: Synthetic oligonucleotide

SEQ ID NO: 1250 - DNA, 57 bp, Artificial Sequence; identical to SEQ ID NO: 1237
  Description of Artificial Sequence: Synthetic oligonucleotide

SEQ ID NO: 1251 - DNA, 57 bp, Artificial Sequence
  Description of Artificial Sequence: Synthetic oligonucleotide
gctggggaccgatcctgattgctcgctgcggcgagactaggagcaaattgtccatct

SEQ ID NO: 1252 - DNA, 57 bp, Artificial Sequence
  Description of Artificial Sequence: Synthetic oligonucleotide
gctggggaccgatcctgattgctcgctgcggcgagacggttctaggagcaaattgtc

SEQ ID NO: 1253 - DNA, 57 bp, Artificial Sequence
  Description of Artificial Sequence: Synthetic oligonucleotide
gctggggaccgatcctgattgctcgctgcggcgagacgctcctagaacccaacaggt

SEQ ID NO: 1254 - DNA, 57 bp, Artificial Sequence; identical to SEQ ID NO: 1235
  Description of Artificial Sequence: Synthetic oligonucleotide

SEQ ID NO: 1255 - DNA, 57 bp, Artificial Sequence
  Description of Artificial Sequence: Synthetic oligonucleotide
gctggggaccgatcctgattgctcgctgcggcgagactccagacgccatctttcagg

SEQ ID NO: 1256 - DNA, 57 bp, Artificial Sequence
  Description of Artificial Sequence: Synthetic oligonucleotide
gctggggaccgatcctgattgctcgctgcggcgagactggtaagagtcctcctgccc

SEQ ID NO: 1257 - DNA, 57 bp, Artificial Sequence
  Description of Artificial Sequence: Synthetic oligonucleotide
gctggggaccgatcctgattgctcgctgcggcgagacttacagcatcttgggtcagg

SEQ ID NO: 1258 - DNA, 57 bp, Artificial Sequence
  Description of Artificial Sequence: Synthetic oligonucleotide
gctggggaccgatcctgattgctcgctgcggcgagacggtcaggtgggccggcagct

SEQ ID NO: 1259 - DNA, 57 bp, Artificial Sequence
  Description of Artificial Sequence: Synthetic oligonucleotide
gctggggaccgatcctgattgctcgctgcggcgagacctatcattggagatgacatt

SEQ ID NO: 1260 - DNA, 57 bp, Artificial Sequence
  Description of Artificial Sequence: Synthetic oligonucleotide
gctggggaccgatcctgattgctcgctgcggcgagacgagatgacattaaccggaga

SEQ ID NO: 1261 - DNA, 57 bp, Artificial Sequence
  Description of Artificial Sequence: Synthetic oligonucleotide
gctggggaccgatcctgattgctcgctgcggcgagactggaactctgtgtcgtatct

SEQ ID NO: 1262 - DNA, 57 bp, Artificial Sequence
  Description of Artificial Sequence: Synthetic oligonucleotide
gctggggaccgatcctgattgctcgctgcggcgagaccagaatttactggagcagct

SEQ ID NO: 1263 - DNA, 57 bp, Artificial Sequence
  Description of Artificial Sequence: Synthetic oligonucleotide
gctggggaccgatcctgattgctcgctgcggcgagacactggagcagctgcagccca

SEQ ID NO: 1264 - DNA, 57 bp, Artificial Sequence
  Description of Artificial Sequence: Synthetic oligonucleotide
gctggggaccgatcctgattgctcgctgcggcgagacccagctgtgggctgcagctg

SEQ ID NO: 1265 - DNA, 57 bp, Artificial Sequence
  Description of Artificial Sequence: Synthetic oligonucleotide
gctggggaccgatcctgattgctcgctgcggcgagacgtaggcattcccagctgtgg

SEQ ID NO: 1266 - DNA, 57 bp, Artificial Sequence
  Description of Artificial Sequence: Synthetic oligonucleotide
gctggggaccgatcctgattgctcgctgcggcgagacgtgaagagttcgtaggcatt

SEQ ID NO: 1267 - DNA, 57 bp, Artificial Sequence
  Description of Artificial Sequence: Synthetic oligonucleotide
gctggggaccgatcctgattgctcgctgcggcgagacaccaagattgcctccaggta

SEQ ID NO: 1268 - DNA, 57 bp, Artificial Sequence
  Description of Artificial Sequence: Synthetic oligonucleotide
gctggggaccgatcctgattgctcgctgcggcgagaccctccaggtacccaccacca

SEQ ID NO: 1269 - DNA, 56 bp, Artificial Sequence
  Description of Artificial Sequence: Synthetic oligonucleotide
ctttcaagactaatagattgctccttacgaggagacctaatgtggatactaactcc

SEQ ID NO: 1270 - DNA, 56 bp, Artificial Sequence
  Description of Artificial Sequence: Synthetic oligonucleotide
ctttcaagactaatagattgctccttacgaggagacttccgtgtggcagctgacat

SEQ ID NO: 1271 - DNA, 56 bp, Artificial Sequence
  Description of Artificial Sequence: Synthetic oligonucleotide
ctttcaagactaatagattgctccttacgaggagacctgatggcaacttcaactgg

SEQ ID NO: 1272 - DNA, 56 bp, Artificial Sequence
  Description of Artificial Sequence: Synthetic oligonucleotide
ctttcaagactaatagattgctccttacgaggagactactttgctagcaaactggt

SEQ ID NO: 1273 - DNA, 56 bp, Artificial Sequence
  Description of Artificial Sequence: Synthetic oligonucleotide
ctttcaagactaatagattgctccttacgaggagacagcaccagtttgctagcaaa

SEQ ID NO: 1274 - DNA, 56 bp, Artificial Sequence
  Description of Artificial Sequence: Synthetic oligonucleotide
ctttcaagactaatagattgctccttacgaggagacaactggggccgggttgttgc

SEQ ID NO: 1275 - DNA, 56 bp, Artificial Sequence
  Description of Artificial Sequence: Synthetic oligonucleotide
ctttcaagactaatagattgctccttacgaggagacttctctttcctgtaggatga

SEQ ID NO: 1276 - DNA, 56 bp, Artificial Sequence
  Description of Artificial Sequence: Synthetic oligonucleotide
ctttcaagactaatagattgctccttacgaggagactctttcctgtaggatgattg

SEQ ID NO: 1277 - DNA, 56 bp, Artificial Sequence
  Description of Artificial Sequence: Synthetic oligonucleotide
ctttcaagactaatagattgctccttacgaggagaccctgtaggatgattgctaat

SEQ ID NO: 1278 - DNA, 56 bp, Artificial Sequence
  Description of Artificial Sequence: Synthetic oligonucleotide
ctttcaagactaatagattgctccttacgaggagacctgtaggatgattgctaatg

SEQ ID NO: 1279 - DNA, 56 bp, Artificial Sequence; identical to SEQ ID NO: 1269
  Description of Artificial Sequence: Synthetic oligonucleotide

SEQ ID NO: 1280 - DNA, 56 bp, Artificial Sequence; identical to SEQ ID NO: 1270
  Description of Artificial Sequence: Synthetic oligonucleotide

SEQ ID NO: 1281 - DNA, 56 bp, Artificial Sequence
  Description of Artificial Sequence: Synthetic oligonucleotide
ctttcaagactaatagattgctccttacgaggagaccgtgtggcagctgacatgtt

SEQ ID NO: 1282 - DNA, 56 bp, Artificial Sequence
  Description of Artificial Sequence: Synthetic oligonucleotide
ctttcaagactaatagattgctccttacgaggagacccatcagcaaacatgtcagc

SEQ ID NO: 1283 - DNA, 56 bp, Artificial Sequence
  Description of Artificial Sequence: Synthetic oligonucleotide
ctttcaagactaatagattgctccttacgaggagacaagttgccatcagcaaacat

SEQ ID NO: 1284 - DNA, 56 bp, Artificial Sequence
  Description of Artificial Sequence: Synthetic oligonucleotide
ctttcaagactaatagattgctccttacgaggagacgctgatggcaacttcaactg

SEQ ID NO: 1285 - DNA, 56 bp, Artificial Sequence; identical to SEQ ID NO: 1271
  Description of Artificial Sequence: Synthetic oligonucleotide

SEQ ID NO: 1286 - DNA, 56 bp, Artificial Sequence; identical to SEQ ID NO: 1274
  Description of Artificial Sequence: Synthetic oligonucleotide

SEQ ID NO: 1287 - DNA, 56 bp, Artificial Sequence
  Description of Artificial Sequence: Synthetic oligonucleotide
ctttcaagactaatagattgctccttacgaggagacttgcccttttctactttgct

SEQ ID NO: 1288 - DNA, 56 bp, Artificial Sequence
  Description of Artificial Sequence: Synthetic oligonucleotide
ctttcaagactaatagattgctccttacgaggagaccccttttctactttgctagc

SEQ ID NO: 1289 - DNA, 56 bp, Artificial Sequence
  Description of Artificial Sequence: Synthetic oligonucleotide
ctttcaagactaatagattgctccttacgaggagacctagcaaagtagaaaagggc

SEQ ID NO: 1290 - DNA, 56 bp, Artificial Sequence
  Description of Artificial Sequence: Synthetic oligonucleotide
ctttcaagactaatagattgctccttacgaggagacgctagcaaagtagaaaaggg

SEQ ID NO: 1291 - DNA, 56 bp, Artificial Sequence
  Description of Artificial Sequence: Synthetic oligonucleotide
ctttcaagactaatagattgctccttacgaggagactctactttgctagcaaactg

SEQ ID NO: 1292 - DNA, 56 bp, Artificial Sequence
  Description of Artificial Sequence: Synthetic oligonucleotide
ctttcaagactaatagattgctccttacgaggagacctactttgctagcaaactgg

SEQ ID NO: 1293 - DNA, 56 bp, Artificial Sequence; identical to SEQ ID NO: 1272
  Description of Artificial Sequence: Synthetic oligonucleotide

SEQ ID NO: 1294 - DNA, 56 bp, Artificial Sequence
  Description of Artificial Sequence: Synthetic oligonucleotide
ctttcaagactaatagattgctccttacgaggagacgctagcaaactggtgctcaa

SEQ ID NO: 1295 - DNA, 56 bp, Artificial Sequence
  Description of Artificial Sequence: Synthetic oligonucleotide
ctttcaagactaatagattgctccttacgaggagacctagcaaactggtgctcaag

SEQ ID NO: 1296 - DNA, 56 bp, Artificial Sequence; identical to SEQ ID NO: 1273
  Description of Artificial Sequence: Synthetic oligonucleotide

SEQ ID NO: 1297 - DNA, 57 bp, Artificial Sequence
  Description of Artificial Sequence: Synthetic oligonucleotide
gctggggaccgatcctgattgctcgctgcggcgagacctaatgtggatactaactcc

SEQ ID NO: 1298 - DNA, 57 bp, Artificial Sequence
  Description of Artificial Sequence: Synthetic oligonucleotide
gctggggaccgatcctgattgctcgctgcggcgagacttccgtgtggcagctgacat

SEQ ID NO: 1299 - DNA, 57 bp, Artificial Sequence
  Description of Artificial Sequence: Synthetic oligonucleotide
gctggggaccgatcctgattgctcgctgcggcgagacctgatggcaacttcaactgg

SEQ ID NO: 1300 - DNA, 57 bp, Artificial Sequence
  Description of Artificial Sequence: Synthetic oligonucleotide
gctggggaccgatcctgattgctcgctgcggcgagactactttgctagcaaactggt

SEQ ID NO: 1301 - DNA, 57 bp, Artificial Sequence
  Description of Artificial Sequence: Synthetic oligonucleotide
gctggggaccgatcctgattgctcgctgcggcgagacagcaccagtttgctagcaaa

SEQ ID NO: 1302 - DNA, 57 bp, Artificial Sequence
  Description of Artificial Sequence: Synthetic oligonucleotide
gctggggaccgatcctgattgctcgctgcggcgagacaactggggccgggttgttgc

SEQ ID NO: 1303 - DNA, 57 bp, Artificial Sequence
  Description of Artificial Sequence: Synthetic oligonucleotide
gctggggaccgatcctgattgctcgctgcggcgagacttctctttcctgtaggatga

SEQ ID NO: 1304 - DNA, 57 bp, Artificial Sequence
  Description of Artificial Sequence: Synthetic oligonucleotide
gctggggaccgatcctgattgctcgctgcggcgagactctttcctgtaggatgattg

SEQ ID NO: 1305 - DNA, 57 bp, Artificial Sequence
  Description of Artificial Sequence: Synthetic oligonucleotide
gctggggaccgatcctgattgctcgctgcggcgagaccctgtaggatgattgctaat

SEQ ID NO: 1306 - DNA, 57 bp, Artificial Sequence
  Description of Artificial Sequence: Synthetic oligonucleotide
gctggggaccgatcctgattgctcgctgcggcgagacctgtaggatgattgctaatg

SEQ ID NO: 1307 - DNA, 57 bp, Artificial Sequence; identical to SEQ ID NO: 1297
  Description of Artificial Sequence: Synthetic oligonucleotide

SEQ ID NO: 1308 - DNA, 57 bp, Artificial Sequence; identical to SEQ ID NO: 1298
  Description of Artificial Sequence: Synthetic oligonucleotide

SEQ ID NO: 1309 - DNA, 57 bp, Artificial Sequence
  Description of Artificial Sequence: Synthetic oligonucleotide
gctggggaccgatcctgattgctcgctgcggcgagaccgtgtggcagctgacatgtt

SEQ ID NO: 1310 - DNA, 57 bp, Artificial Sequence
  Description of Artificial Sequence: Synthetic oligonucleotide
gctggggaccgatcctgattgctcgctgcggcgagacccatcagcaaacatgtcagc

SEQ ID NO: 1311 - DNA, 57 bp, Artificial Sequence
  Description of Artificial Sequence: Synthetic oligonucleotide
gctggggaccgatcctgattgctcgctgcggcgagacaagttgccatcagcaaacat

SEQ ID NO: 1312 - DNA, 57 bp, Artificial Sequence
  Description of Artificial Sequence: Synthetic oligonucleotide
gctggggaccgatcctgattgctcgctgcggcgagacgctgatggcaacttcaactg

SEQ ID NO: 1313 - DNA, 57 bp, Artificial Sequence; identical to SEQ ID NO: 1299
  Description of Artificial Sequence: Synthetic oligonucleotide

SEQ ID NO: 1314 - DNA, 57 bp, Artificial Sequence; identical to SEQ ID NO: 1302
  Description of Artificial Sequence: Synthetic oligonucleotide

SEQ ID NO: 1315 - DNA, 57 bp, Artificial Sequence
  Description of Artificial Sequence: Synthetic oligonucleotide
gctggggaccgatcctgattgctcgctgcggcgagacttgcccttttctactttgct

SEQ ID NO: 1316 - DNA, 57 bp, Artificial Sequence
  Description of Artificial Sequence: Synthetic oligonucleotide
gctggggaccgatcctgattgctcgctgcggcgagaccccttttctactttgctagc

SEQ ID NO: 1317 - DNA, 57 bp, Artificial Sequence
  Description of Artificial Sequence: Synthetic oligonucleotide
gctggggaccgatcctgattgctcgctgcggcgagacctagcaaagtagaaaagggc

SEQ ID NO: 1318 - DNA, 57 bp, Artificial Sequence
  Description of Artificial Sequence: Synthetic oligonucleotide
gctggggaccgatcctgattgctcgctgcggcgagacgctagcaaagtagaaaaggg

SEQ ID NO: 1319 - DNA, 57 bp, Artificial Sequence
  Description of Artificial Sequence: Synthetic oligonucleotide
gctggggaccgatcctgattgctcgctgcggcgagactctactttgctagcaaactg

SEQ ID NO: 1320 - DNA, 57 bp, Artificial Sequence
  Description of Artificial Sequence: Synthetic oligonucleotide
gctggggaccgatcctgattgctcgctgcggcgagacctactttgctagcaaactgg

SEQ ID NO: 1321 - DNA, 57 bp, Artificial Sequence; identical to SEQ ID NO: 1300
  Description of Artificial Sequence: Synthetic oligonucleotide

SEQ ID NO: 1322 - DNA, 57 bp, Artificial Sequence
  Description of Artificial Sequence: Synthetic oligonucleotide
gctggggaccgatcctgattgctcgctgcggcgagacgctagcaaactggtgctcaa

SEQ ID NO: 1323 - DNA, 57 bp, Artificial Sequence
  Description of Artificial Sequence: Synthetic oligonucleotide
gctggggaccgatcctgattgctcgctgcggcgagacctagcaaactggtgctcaag

SEQ ID NO: 1324 - DNA, 57 bp, Artificial Sequence; identical to SEQ ID NO: 1301
  Description of Artificial Sequence: Synthetic oligonucleotide

SEQ ID NO: 1325 - DNA, 56 bp, Artificial Sequence
  Description of Artificial Sequence: Synthetic oligonucleotide
ctttcaagactaatagattgctccttacgaggagacccactttgtcagtgcgtctg

SEQ ID NO: 1326 - DNA, 56 bp, Artificial Sequence
  Description of Artificial Sequence: Synthetic oligonucleotide
ctttcaagactaatagattgctccttacgaggagacctcaatgggatggaaggctg

SEQ ID NO: 1327 - DNA, 56 bp, Artificial Sequence
  Description of Artificial Sequence: Synthetic oligonucleotide
ctttcaagactaatagattgctccttacgaggagacaggaatacatggtacacgtt

SEQ ID NO: 1328 - DNA, 56 bp, Artificial Sequence
  Description of Artificial Sequence: Synthetic oligonucleotide
ctttcaagactaatagattgctccttacgaggagacaagaacattttcagcttctc

SEQ ID NO: 1329 - DNA, 56 bp, Artificial Sequence
  Description of Artificial Sequence: Synthetic oligonucleotide
ctttcaagactaatagattgctccttacgaggagacatccactttcattctgcgtt

SEQ ID NO: 1330 - DNA, 56 bp, Artificial Sequence
  Description of Artificial Sequence: Synthetic oligonucleotide
ctttcaagactaatagattgctccttacgaggagactttgttaaaggaggcaaaga

SEQ ID NO: 1331 - DNA, 56 bp, Artificial Sequence
  Description of Artificial Sequence: Synthetic oligonucleotide
ctttcaagactaatagattgctccttacgaggagactccccagagtccatgtcaga

SEQ ID NO: 1332 - DNA, 56 bp, Artificial Sequence
  Description of Artificial Sequence: Synthetic oligonucleotide
ctttcaagactaatagattgctccttacgaggagactcagtgcgtctgacatggac

SEQ ID NO: 1333 - DNA, 56 bp, Artificial Sequence
  Description of Artificial Sequence: Synthetic oligonucleotide
ctttcaagactaatagattgctccttacgaggagacgtcagtgcgtctgacatgga

SEQ ID NO: 1334 - DNA, 56 bp, Artificial Sequence; identical to SEQ ID NO: 1325
  Description of Artificial Sequence: Synthetic oligonucleotide

SEQ ID NO: 1335 - DNA, 56 bp, Artificial Sequence
  Description of Artificial Sequence: Synthetic oligonucleotide
ctttcaagactaatagattgctccttacgaggagactgttcccactttgtcagtgc

SEQ ID NO: 1336 - DNA, 56 bp, Artificial Sequence; identical to SEQ ID NO: 1326
  Description of Artificial Sequence: Synthetic oligonucleotide

SEQ ID NO: 1337 - DNA, 56 bp, Artificial Sequence
  Description of Artificial Sequence: Synthetic oligonucleotide
ctttcaagactaatagattgctccttacgaggagaccatcccattgaggaatacat

SEQ ID NO: 1338 - DNA, 56 bp, Artificial Sequence; identical to SEQ ID NO: 1327
  Description of Artificial Sequence: Synthetic oligonucleotide

SEQ ID NO: 1339 - DNA, 56 bp, Artificial Sequence
  Description of Artificial Sequence: Synthetic oligonucleotide
ctttcaagactaatagattgctccttacgaggagacaacgtgtaccatgtattcct

SEQ ID NO: 1340 - DNA, 56 bp, Artificial Sequence
  Description of Artificial Sequence: Synthetic oligonucleotide
ctttcaagactaatagattgctccttacgaggagacttcaacgtgtaccatgtatt

SEQ ID NO: 1341 - DNA, 56 bp, Artificial Sequence; identical to SEQ ID NO: 1328
  Description of Artificial Sequence: Synthetic oligonucleotide

SEQ ID NO: 1342 - DNA, 56 bp, Artificial Sequence
  Description of Artificial Sequence: Synthetic oligonucleotide
ctttcaagactaatagattgctccttacgaggagacgagaagctgaaaatgttctt

SEQ ID NO: 1343 - DNA, 56 bp, Artificial Sequence
  Description of Artificial Sequence: Synthetic oligonucleotide
ctttcaagactaatagattgctccttacgaggagactcagcttctcgaacgcagaa

SEQ ID NO: 1344 - DNA, 56 bp, Artificial Sequence
  Description of Artificial Sequence: Synthetic oligonucleotide
ctttcaagactaatagattgctccttacgaggagaccagcttctcgaacgcagaat

SEQ ID NO: 1345 - DNA, 56 bp, Artificial Sequence
  Description of Artificial Sequence: Synthetic oligonucleotide
ctttcaagactaatagattgctccttacgaggagactgcgttcgagaagctgaaaa

SEQ ID NO: 1346 - DNA, 56 bp, Artificial Sequence
  Description of Artificial Sequence: Synthetic oligonucleotide
ctttcaagactaatagattgctccttacgaggagacagcttctcgaacgcagaatg

SEQ ID NO: 1347 - DNA, 56 bp, Artificial Sequence
  Description of Artificial Sequence: Synthetic oligonucleotide
ctttcaagactaatagattgctccttacgaggagacattctgcgttcgagaagctg

SEQ ID NO: 1348 - DNA, 56 bp, Artificial Sequence
  Description of Artificial Sequence: Synthetic oligonucleotide
ctttcaagactaatagattgctccttacgaggagaccattctgcgttcgagaagct

SEQ ID NO: 1349 - DNA, 56 bp, Artificial Sequence
  Description of Artificial Sequence: Synthetic oligonucleotide
ctttcaagactaatagattgctccttacgaggagactcgaacgcagaatgaaagtg

SEQ ID NO: 1350 - DNA, 56 bp, Artificial Sequence; identical to SEQ ID NO: 1329
  Description of Artificial Sequence: Synthetic oligonucleotide

SEQ ID NO: 1351 - DNA, 56 bp, Artificial Sequence
  Description of Artificial Sequence: Synthetic oligonucleotide
ctttcaagactaatagattgctccttacgaggagactatccactttcattctgcgt

SEQ ID NO: 1352 - DNA, 56 bp, Artificial Sequence
  Description of Artificial Sequence: Synthetic oligonucleotide
ctttcaagactaatagattgctccttacgaggagacttatccactttcattctgcg

SEQ ID NO: 1353 - DNA, 56 bp, Artificial Sequence
  Description of Artificial Sequence: Synthetic oligonucleotide
ctttcaagactaatagattgctccttacgaggagactttatccactttcattctgc

SEQ ID NO: 1354 - DNA, 56 bp, Artificial Sequence
  Description of Artificial Sequence: Synthetic oligonucleotide
ctttcaagactaatagattgctccttacgaggagacttttatccactttcattctg

SEQ ID NO: 1355 - DNA, 56 bp, Artificial Sequence
  Description of Artificial Sequence: Synthetic oligonucleotide
ctttcaagactaatagattgctccttacgaggagacaacaaagaagggtcatcagt

SEQ ID NO: 1356 - DNA, 56 bp, Artificial Sequence
  Description of Artificial Sequence: Synthetic oligonucleotide
ctttcaagactaatagattgctccttacgaggagaccctcctttaacaaagaaggg

SEQ ID NO: 1357 - DNA, 56 bp, Artificial Sequence
  Description of Artificial Sequence: Synthetic oligonucleotide
ctttcaagactaatagattgctccttacgaggagacgcctcctttaacaaagaagg

SEQ ID NO: 1358 - DNA, 56 bp, Artificial Sequence; identical to SEQ ID NO: 1330
  Description of Artificial Sequence: Synthetic oligonucleotide

SEQ ID NO: 1359 - DNA, 56 bp, Artificial Sequence
  Description of Artificial Sequence: Synthetic oligonucleotide
ctttcaagactaatagattgctccttacgaggagacgttaaaggaggcaaagacaa

SEQ ID NO: 1360 - DNA, 56 bp, Artificial Sequence
  Description of Artificial Sequence: Synthetic oligonucleotide
ctttcaagactaatagattgctccttacgaggagacttaaaggaggcaaagacaaa

SEQ ID NO: 1361 - DNA, 56 bp, Artificial Sequence
  Description of Artificial Sequence: Synthetic oligonucleotide
ctttcaagactaatagattgctccttacgaggagactctttgcctcctttaacaaa

SEQ ID NO: 1362 - DNA, 56 bp, Artificial Sequence
  Description of Artificial Sequence: Synthetic oligonucleotide
ctttcaagactaatagattgctccttacgaggagacgtctttgcctcctttaacaa

SEQ ID NO: 1363 - DNA, 56 bp, Artificial Sequence
  Description of Artificial Sequence: Synthetic oligonucleotide
ctttcaagactaatagattgctccttacgaggagacgtctaacttactttgtcttt

SEQ ID NO: 1364 - DNA, 56 bp, Artificial Sequence
  Description of Artificial Sequence: Synthetic oligonucleotide
ctttcaagactaatagattgctccttacgaggagacttggtctaacttactttgtc

SEQ ID NO: 1365 - DNA, 57 bp, Artificial Sequence
  Description of Artificial Sequence: Synthetic oligonucleotide
gctggggaccgatcctgattgctcgctgcggcgagacccactttgtcagtgcgtctg

SEQ ID NO: 1366 - DNA, 57 bp, Artificial Sequence
  Description of Artificial Sequence: Synthetic oligonucleotide
gctggggaccgatcctgattgctcgctgcggcgagacctcaatgggatggaaggctg

SEQ ID NO: 1367 - DNA, 57 bp, Artificial Sequence
  Description of Artificial Sequence: Synthetic oligonucleotide
gctggggaccgatcctgattgctcgctgcggcgagacaggaatacatggtacacgtt

SEQ ID NO: 1368 - DNA, 57 bp, Artificial Sequence
  Description of Artificial Sequence: Synthetic oligonucleotide
gctggggaccgatcctgattgctcgctgcggcgagacaagaacattttcagcttctc

SEQ ID NO: 1369 - DNA, 57 bp, Artificial Sequence
  Description of Artificial Sequence: Synthetic oligonucleotide
gctggggaccgatcctgattgctcgctgcggcgagacatccactttcattctgcgtt

SEQ ID NO: 1370 - DNA, 57 bp, Artificial Sequence
  Description of Artificial Sequence: Synthetic oligonucleotide
gctggggaccgatcctgattgctcgctgcggcgagactttgttaaaggaggcaaaga

SEQ ID NO: 1371 - DNA, 57 bp, Artificial Sequence
  Description of Artificial Sequence: Synthetic oligonucleotide
gctggggaccgatcctgattgctcgctgcggcgagactccccagagtccatgtcaga

SEQ ID NO: 1372 - DNA, 57 bp, Artificial Sequence
  Description of Artificial Sequence: Synthetic oligonucleotide
gctggggaccgatcctgattgctcgctgcggcgagactcagtgcgtctgacatggac

SEQ ID NO: 1373 - DNA, 57 bp, Artificial Sequence
  Description of Artificial Sequence: Synthetic oligonucleotide
gctggggaccgatcctgattgctcgctgcggcgagacgtcagtgcgtctgacatgga

SEQ ID NO: 1374 - DNA, 57 bp, Artificial Sequence; identical to SEQ ID NO: 1365
  Description of Artificial Sequence: Synthetic oligonucleotide

SEQ ID NO: 1375 - DNA, 57 bp, Artificial Sequence
  Description of Artificial Sequence: Synthetic oligonucleotide
gctggggaccgatcctgattgctcgctgcggcgagactgttcccactttgtcagtgc

SEQ ID NO: 1376 - DNA, 57 bp, Artificial Sequence; identical to SEQ ID NO: 1366
  Description of Artificial Sequence: Synthetic oligonucleotide

SEQ ID NO: 1377 - DNA, 57 bp, Artificial Sequence
  Description of Artificial Sequence: Synthetic oligonucleotide
gctggggaccgatcctgattgctcgctgcggcgagaccatcccattgaggaatacat

SEQ ID NO: 1378 - DNA, 57 bp, Artificial Sequence; identical to SEQ ID NO: 1367
  Description of Artificial Sequence: Synthetic oligonucleotide

SEQ ID NO: 1379 - DNA, 57 bp, Artificial Sequence
  Description of Artificial Sequence: Synthetic oligonucleotide
gctggggaccgatcctgattgctcgctgcggcgagacaacgtgtaccatgtattcct

SEQ ID NO: 1380 - DNA, 57 bp, Artificial Sequence
  Description of Artificial Sequence: Synthetic oligonucleotide
gctggggaccgatcctgattgctcgctgcggcgagacttcaacgtgtaccatgtatt

SEQ ID NO: 1381 - DNA, 57 bp, Artificial Sequence; identical to SEQ ID NO: 1368
  Description of Artificial Sequence: Synthetic oligonucleotide

SEQ ID NO: 1382 - DNA, 57 bp, Artificial Sequence
  Description of Artificial Sequence: Synthetic oligonucleotide
gctggggaccgatcctgattgctcgctgcggcgagacgagaagctgaaaatgttctt

SEQ ID NO: 1383 - DNA, 57 bp, Artificial Sequence
  Description of Artificial Sequence: Synthetic oligonucleotide
gctggggaccgatcctgattgctcgctgcggcgagactcagcttctcgaacgcagaa

SEQ ID NO: 1384 - DNA, 57 bp, Artificial Sequence
  Description of Artificial Sequence: Synthetic oligonucleotide
gctggggaccgatcctgattgctcgctgcggcgagaccagcttctcgaacgcagaat

SEQ ID NO: 1385 - DNA, 57 bp, Artificial Sequence
  Description of Artificial Sequence: Synthetic oligonucleotide
gctggggaccgatcctgattgctcgctgcggcgagactgcgttcgagaagctgaaaa

SEQ ID NO: 1386 - DNA, 57 bp, Artificial Sequence
  Description of Artificial Sequence: Synthetic oligonucleotide
gctggggaccgatcctgattgctcgctgcggcgagacagcttctcgaacgcagaatg

SEQ ID NO: 1387 - DNA, 57 bp, Artificial Sequence
  Description of Artificial Sequence: Synthetic oligonucleotide
gctggggaccgatcctgattgctcgctgcggcgagacattctgcgttcgagaagctg

SEQ ID NO: 1388 - DNA, 57 bp, Artificial Sequence
  Description of Artificial Sequence: Synthetic oligonucleotide
gctggggaccgatcctgattgctcgctgcggcgagaccattctgcgttcgagaagct

SEQ ID NO: 1389 - DNA, 57 bp, Artificial Sequence
  Description of Artificial Sequence: Synthetic oligonucleotide
gctggggaccgatcctgattgctcgctgcggcgagactcgaacgcagaatgaaagtg

SEQ ID NO: 1390 - DNA, 57 bp, Artificial Sequence; identical to SEQ ID NO: 1369
  Description of Artificial Sequence: Synthetic oligonucleotide

SEQ ID NO: 1391 - DNA, 57 bp, Artificial Sequence
  Description of Artificial Sequence: Synthetic oligonucleotide
gctggggaccgatcctgattgctcgctgcggcgagactatccactttcattctgcgt

SEQ ID NO: 1392 - DNA, 57 bp, Artificial Sequence
  Description of Artificial Sequence: Synthetic oligonucleotide
gctggggaccgatcctgattgctcgctgcggcgagacttatccactttcattctgcg

SEQ ID NO: 1393 - DNA, 57 bp, Artificial Sequence
  Description of Artificial Sequence: Synthetic oligonucleotide
gctggggaccgatcctgattgctcgctgcggcgagactttatccactttcattctgc

SEQ ID NO: 1394 - DNA, 57 bp, Artificial Sequence
  Description of Artificial Sequence: Synthetic oligonucleotide
gctggggaccgatcctgattgctcgctgcggcgagacttttatccactttcattctg

SEQ ID NO: 1395 - DNA, 57 bp, Artificial Sequence
  Description of Artificial Sequence: Synthetic oligonucleotide
gctggggaccgatcctgattgctcgctgcggcgagacaacaaagaagggtcatcagt

SEQ ID NO: 1396 - DNA, 57 bp, Artificial Sequence
  Description of Artificial Sequence: Synthetic oligonucleotide
gctggggaccgatcctgattgctcgctgcggcgagaccctcctttaacaaagaaggg

SEQ ID NO: 1397 - DNA, 57 bp, Artificial Sequence
  Description of Artificial Sequence: Synthetic oligonucleotide
gctggggaccgatcctgattgctcgctgcggcgagacgcctcctttaacaaagaagg

SEQ ID NO: 1398 - DNA, 57 bp, Artificial Sequence; identical to SEQ ID NO: 1370
  Description of Artificial Sequence: Synthetic oligonucleotide

SEQ ID NO: 1399 - DNA, 57 bp, Artificial Sequence
  Description of Artificial Sequence: Synthetic oligonucleotide
gctggggaccgatcctgattgctcgctgcggcgagacgttaaaggaggcaaagacaa

SEQ ID NO: 1400 - DNA, 57 bp, Artificial Sequence
  Description of Artificial Sequence: Synthetic oligonucleotide
gctggggaccgatcctgattgctcgctgcggcgagacttaaaggaggcaaagacaaa

SEQ ID NO: 1401 - DNA, 57 bp, Artificial Sequence
  Description of Artificial Sequence: Synthetic oligonucleotide
gctggggaccgatcctgattgctcgctgcggcgagactctttgcctcctttaacaaa

SEQ ID NO: 1402 - DNA, 57 bp, Artificial Sequence
  Description of Artificial Sequence: Synthetic oligonucleotide
gctggggaccgatcctgattgctcgctgcggcgagacgtctttgcctcctttaacaa

SEQ ID NO: 1403 - DNA, 57 bp, Artificial Sequence
  Description of Artificial Sequence: Synthetic oligonucleotide
gctggggaccgatcctgattgctcgctgcggcgagacgtctaacttactttgtcttt

SEQ ID NO: 1404 - DNA, 57 bp, Artificial Sequence
  Description of Artificial Sequence: Synthetic oligonucleotide
gctggggaccgatcctgattgctcgctgcggcgagacttggtctaacttactttgtc

SEQ ID NO: 1405 - DNA, 2271 bp, Unknown
  Description of Unknown: CasPhi sequence
atgcctaagcctgccgtggaaagcgagttcagcaaggtgctgaagaagcacttccccggcgagcggttcagatccagctacatgaagagaggcggcaagatcctggccgctcaaggcgaagaagccgtggtcgcatatctgcagggcaagagcgaggaagaacctcctaacttccagcctcctgccaagtgccacgtggtcaccaagagcagagatttcgccgagtggcccatcatgaaggcctctgaagccatccagcggtacatctacgccctgagcacaacagaaagagccgcctgcaagcctggcaagagcagcgaatctcacgccgcttggtttgccgctaccggcgtgtccaatcacggctactctcatgtgcagggcctgaacctgatcttcgatcacaccctgggcagatacgacggcgtgctgaaaaaggtgcagctgcggaacgagaaggccagagccagactggaatccatcaacgccagcagagccgatgagggcctgcctgagattaaggccgaagaggaagaggtggccacaaacgaaaccggccatctgctgcagccacctggcatcaaccctagcttctacgtgtaccagacaatcagccctcaggcctacagacccagggacgagattgtgctgcctcctgagtatgccggctacgtgcgggatcccaacgctcctattcctctgggcgtcgtgcggaacagatgcgacatccagaaaggctgccccggctacattcccgagtggcagagagaagccggcaccgccatttctccaaagacaggcaaagccgtgaccgtgcctggcctgtctcctaagaaaaacaagcggatgcggcggtactggcggagcgagaaagaaaaagcccaggacgccctgctggtcacagtgcggattggcacagattgggtcgtgatcgatgtgcgcggcctgctgagaaatgccagatggcggacaatcgcccctaaggacatcagcctgaacgcactgctggacctgttcaccggcgatcctgtgattgacgtgcggcggaacatcgtgaccttcacctacacactggacgcctgcggcacctacgccagaaagtggacactgaagggcaagcagaccaaggccactctggacaagctgaccgccacacagacagtggccctggtggctattgatctgggccagacaaaccctatcagcgccggcatcagcagagtgacccaagaaaatggcgccctgcagtgcgagcccctggacagattcacactgcccgacgacctgctgaaggacatctccgcctatagaatcgcctgggaccgcaatgaagaggaactgagagccagaagcgtggaagccctgcctgaagcacagcaggctgaagtgcgagcactggacggggtgtccaaagagacagccagaactcagctgtgcgccgactttggactggaccccaaaagactgccctgggacaagatgagcagcaacaccaccttcatcagcgaggccctgctgagcaatagcgtgtccagagatcaggtgttcttcacccctgctccaaagaagggcgccaagaagaaagcccctgtcgaagtgatgcggaaggaccggacatgggccagagcttacaagcccagactgtccgtggaagctcagaagctgaagaacgaagccctgtgggccctgaagagaacaagccccgagtacctgaagctgagccggcggaaagaagaactctgccggcggagcatcaactacgtgatcgagaaaacccggcggagaacccagtgccagatcgtgattcctgtgatcgaggacctgaacgtgcggttctttcacggcagcggcaagagactgcccggctgggataatttcttcaccgccaaaaaagaaaaccggtggttcatccagggcctgcacaaggccttcagcgacctgagaacccaccggtccttttacgtgttcgaagtgcggcccgagcggaccagcatcacctgtcctaaatgcggccactgcgaagtgggcaacagagatggcgaggccttccagtgtctgagctgtggcaagacctgcaacgccgacctggatgtggccactcacaatctgacacaggtggccctgaccggcaagaccatgcctaagagagaggaacctagggacgcccagggtacagcccctgccagaaagacaaagaaagccagcaagagcaaggcccctcctgccgagagagaagatcagaccccagctcaagagcccagccagacatct

SEQ ID NO: 1406 - DNA, 2298 bp, Unknown
  Description of Unknown: CasPhi sequence
atggaaaaagagatcaccgagctgaccaagatccgcagagagttccccaacaagaagttcagcagcaccgacatgaagaaggccggcaagctgctgaaggccgaaggacctgatgccgtgcgggacttcctgaacagctgccaagagatcatcggcgacttcaagcctccagtcaagaccaacatcgtgtccatcagcagacccttcgaggaatggcccgtgtccatggttggacgggccatccaagagtactacttcagcctgaccaaagaggaactggaaagcgttcaccccggcaccagcagcgaggaccacaagagctttttcaacatcaccggcctgagcaactacaactacaccagcgtgcagggcctgaacctgatcttcaagaacgccaaggccatctacgacggcaccctggtcaaggccaacaacaagaacaagaagctcgagaagaagtttaacgagatcaaccacaagcggagcctggaaggcctgcctatcatcacccctgatttcgaggaacccttcgacgagaacggccacctgaacaaccctccaggcatcaaccggaacatctacggctatcagggctgcgccgccaaggtgttcgtgccttctaagcacaagatggtgtccctgcctaaagagtacgagggctacaacagggaccccaacctgtctctggccggcttcagaaacagactggaaatccctgagggcgagcctggccatgtgccatggttccagagaatggatatccccgagggccagatcggacacgtgaacaagatccagcggttcaacttcgtgcacggcaagaacagcggcaaagtgaagttctccgacaagaccggcagagtgaagagataccaccacagcaagtacaaggacgctaccaagccttacaagttcctggaagagtccaagaaggtgtcagccctggacagcatcctggccatcatcacaatcggcgacgactgggtcgtgttcgacatcagaggcctgtaccggaacgtgttctacagagagctggcccagaaaggcctgacagctgtgcaactgctggacctgtttaccggcgatcccgtgatcgaccccaagaaaggcgtggtcaccttcagctacaaagagggcgtcgtccccgtctttagccagaaaatcgtgccccggttcaagagccgggacaccctggaaaagctgacctctcagggacctgtggctctgctgtctgtggacctgggacagaatgaacctgtggccgccagagtgtgcagcctgaagaacatcaacgacaagatcaccctggacaactcttgccggatcagcttcctggacgactacaagaagcagatcaaggactacagagacagcctggacgagctggaaatcaagatccggctggaagccatcaactccctcgagacaaaccagcaggtcgagatcagagatctggacgtgttcagcgccgaccgggccaaagccaataccgtggacatgtttgacatcgaccctaacctgatcagctgggactccatgagcgacgccagagtcagcacccagatcagcgacctgtacctgaagaatggcggcgacgagagccgggtgtactttgagattaacaacaaacggattaagcggagcgactacaacatcagccagctcgtgcggcccaagctgagcgatagcaccagaaagaacctgaacgacagcatctggaagctgaagcggaccagcgaggaatacctgaagctgagcaagcggaagctggaactgagcagagccgtcgtgaattacaccatccggcagagcaaactgctgagcggcatcaatgacatcgtgatcattctcgaggacctggacgtgaagaagaaattcaacggcagaggcatccgcgatatcggctgggacaacttcttcagctcccggaaagaaaaccggtggttcatccccgccttccacaaggcctttagcgagctgagcagcaacaggggcctgtgcgtgatcgaagtgaatcctgcctggaccagcgccacctgtcctgattgtggcttctgcagcaaagaaaacagagatggcatcaacttcacgtgccggaagtgcggcgtgtcctaccacgccgatattgacgtggccacactgaatattgccagagtggccgtgctgggcaagcctatgtctggacctgccgacagagagagactgggcgacaccaagaaacctagagtggcccgcagcagaaagaccatgaagcggaaggacatcagcaacagcaccgtcgaggccatggttacagct

SEQ ID NO: 1407 - DNA, 2316 bp, Unknown
  Description of Unknown: CasPhi sequence
atgagcaacaccgccgtgtccaccagagaacacatgtccaacaagacaacccctccatctcctctgagcctgctgctgagagcccactttcctggcctgaagttcgagagccaggactacaagatcgccggcaagaaactgagagatggcggacctgaggccgtgatcagctacctgactggaaaaggccaggccaagctgaaggacgtgaagcctcctgccaaggcctttgtgatcgcccagagcagacccttcatcgagtgggacctcgtcagagtgtcccggcagatccaagagaagatctttggcatccccgccaccaagggcagacctaagcaagatggcctgagcgagacagccttcaacgaagccgtggccagcctggaagtggacggcaagagcaagctgaacgaggaaaccagagccgccttctacgaggtgctgggacttgatgccccaagcctgcatgctcaggcccagaatgccctgatcaagagcgccatcagcatcagagaaggcgtgctgaagaaggtggaaaaccggaacgagaagaacctgagcaagaccaagcggcggaaagaggctggcgaagaggccacctttgtggaagagaaggcccacgacgagcggggctatctgattcatcctcctggcgtgaaccagacaatccccggctatcaggccgtggtcatcaagagctgccccagcgatttcatcggcctgcctagtggctgtctggccaaagagtctgccgaggctctgaccgattacctgcctcacgaccggatgactatccccaagggacagcctggctatgtgcccgaatggcagcaccctctgctgaacagaagaaagaaccggcgcagaagagactggtacagcgccagcctgaacaagcccaaggccacctgtagcaagagatccggcacacccaaccggaagaacagcagaaccgaccagatccagagcggcagattcaagggcgccattcctgtgctgatgcggttccaggatgagtgggtcatcatcgacatccggggcctgctgagaaacgcccggtatcggaagctgctgaaagagaagtccaccattcctgacctgctgagcctgttcaccggcgatcccagcatcgatatgagacagggcgtgtgcaccttcatctacaaggccggccaggcctgtagcgccaagatggtcaagacaaagaacgcccctgagatcctgtccgagctgaccaagtctggacctgtggtgctggtgtccatcgacctgggccagacaaatcctatcgccgccaaggtgtccagagtgacccagctgtctgatggccagctgagccacgagacactgctgagggaactgctgagcaacgatagcagcgacggcaaagagatcgcccggtacagagtggccagcgacagactgagagacaagctggccaatctggccgtggaaagactgagccctgagcacaagagcgagatcctgagagccaagaacgacacccctgctctgtgcaaggccagagtgtgtgctgccctgggactgaaccctgaaatgatcgcctgggacaagatgaccccttacaccgagtttctggccaccgcctacctggaaaaaggcggcgacagaaaagtggccacactgaagcccaagaacagacccgagatgctgcggcgggacatcaagttcaagggaaccgagggcgtcagaatcgaggtgtcacctgaagccgccgaggcctatagagaagcccagtgggatctgcagaggacaagccccgagtacctgagactgtccacctggaagcaagagctgacaaagagaatcctgaaccagctgcggcacaaggccgccaaaagcagccagtgtgaagtggtggtcatggccttcgaggacctgaacatcaagatgatgcacggcaacggcaagtgggccgatggtggatgggatgccttcttcatcaagaaacgcgagaaccggtggttcatgcaggccttccacaagagcctgacagagctgggagcacacaagggcgtgccaaccatcgaagtgacccctcacagaaccagcatcacctgtaccaagtgcggccactgcgacaaggccaacagagatggggagagattcgcctgccagaaatgcggctttgtggcccacgccgatctggaaatcgccaccgacaacatcgagagagtggccctgacaggcaagcccatgcctaagcctgagagcgagagaagcggcgacgccaagaaatctgtgggagccagaaaggccgccttcaagcctgaggaagatgccgaagctgccgag

SEQ ID NO: 1408 - DNA, 2151 bp, Unknown
  Description of Unknown: CasPhi sequence
atgatcaagcctaccgtcagccagtttctgacccctggcttcaagctgatccggaaccactctagaacagccggcctgaagctgaagaacgagggcgaagaggcctgcaagaaattcgtgcgcgagaacgagatccccaaggacgagtgccccaactttcaaggcggacccgccattgccaacatcattgccaagagccgcgagttcaccgagtgggagatctaccagtctagcctggccatccaagaagtgatcttcaccctgcctaaggacaagctgcccgagcctatcctgaaagaggaatggcgagcccagtggctgtctgagcacggactggataccgtgccttacaaagaagccgccggactgaacctgatcatcaagaacgccgtgaacacctacaagggcgtgcaagtgaaggtggacaacaagaacaaaaacaacctggccaagatcaaccggaagaatgagatcgccaagctgaacggcgagcaagagatcagcttcgaggaaatcaaggccttcgacgacaagggctacctgctgcagaagccctctccaaacaagagcatctactgctaccagagcgtgtcccctaagcctttcatcaccagcaagtaccacaacgtgaacctgcctgaagagtacatcggctactaccggaagtccaacgagcccatcgtgtccccataccagttcgacagactgcggatccctatcggcgagcctggctatgtgcctaagtggcagtacaccttcctgagcaagaaagagaacaagcggcggaagctgagcaagcggatcaagaatgtgtccccaatcctgggcatcatctgcatcaagaaagattggtgcgtgttcgacatgcggggcctgctgagaacaaaccactggaagaagtatcacaagcccaccgacagcatcaacgacctgttcgactacttcaccggcgatcccgtgatcgacaccaaggccaatgtcgtgcggttccggtacaagatggaaaacggcatcgtgaactacaagcccgtgcgggaaaagaagggcaaagagctgctggaaaacatctgcgaccagaacggcagctgcaagctggccacagtggatgtgggccagaacaaccctgtggccatcggcctgttcgagctgaaaaaagtgaacggggagctgaccaagacactgatcagcagacaccccacacctatcgatttctgcaacaagatcaccgcctaccgcgagagatacgacaagctggaaagcagcatcaagctggacgccatcaagcagctgaccagcgagcagaaaatcgaagtggacaactacaacaacaacttcacgccccagaacaccaagcagatcgtgtgcagcaagctgaatatcaaccccaacgatctgccctgggacaagatgatcagcggcacccacttcatcagcgagaaggcccaggtgtccaacaagagcgagatctactttaccagcaccgataagggcaagaccaaggacgtgatgaagtccgactacaagtggttccaggactataagcccaagctgtccaaagaagtgcgggacgccctgagcgatattgagtggcggctgagaagagagagcctggaattcaacaagctcagcaagagcagagagcaggacgccagacagctggccaattggatcagcagcatgtgcgacgtgatcggcatcgagaacctggtcaagaagaacaacttcttcggcggcagcggcaagagagaacccggctgggacaacttctacaagccgaagaaagaaaaccggtggtggatcaacgccatccacaaggccctgacagagctgtcccagaacaagggaaagagagtgatcctgctgcctgccatgcggaccagcatcacctgtcctaagtgcaagtactgcgacagcaagaaccgcaacggcgagaagttcaattgcctgaagtgtggcattgagctgaacgccgacatcgacgtggccaccgaaaatctggctaccgtggccatcacagcccagagcatgcctaagccaacctgcgagagaagcggcgacgccaagaaacctgtgcgggccagaaaagccaaggctcccgagttccacgataagctggcccctagctacaccgtggtgctgagagaagctgtg

SEQ ID NO: 1409 - DNA, 2298 bp, Unknown
  Description of Unknown: CasPhi sequence
atgtacagcctggaaatggccgacctgaagtccgagccttctctgctggctaagctgctgagagacagattccccggcaagtactggctgcctaagtactggaagctggccgagaagaagagactgacaggcggagaagaagccgcctgcgagtacatggctgacaagcagctggatagccctccacctaacttccggcctccagccagatgtgtgatcctggccaagagcagacccttcgaggattggccagtgcacagagtggccagcaaggcccagtcttttgtgatcggcctgagcgagcagggcttcgctgctcttagagctgcccctcctagcacagccgacgccagaagagattggctgagaagccatggcgccagcgaggatgatctgatggctctggaagcccagctgctggaaaccatcatgggcaacgccatttctctgcacggcggcgtgctgaagaagatcgacaacgccaacgtgaaggccgccaagagactgtccggaagaaacgaggccagactgaacaagggcctgcaagagctgcctcctgagcaagagggatctgcctatggcgccgatggcctgctggttaatcctcctggcctgaacctgaacatctactgcagaaagagctgctgccccaagcctgtgaagaacaccgccagattcgtgggacactaccccggctacctgagagactccgacagcatcctgatcagcggcaccatggaccggctgacaatcatcgagggaatgcccggacacatccccgcctggcaacgagaacagggacttgtgaaacctggcggcagaaggcggagactgtctggcagcgagagcaacatgagacagaaggtggaccccagcacaggccccagaagaagcacaagatccggcaccgtgaacagaagcaaccagcggacaggcagaaacggcgatcctctgctggtggaaatccggatgaaggaagattgggtcctgctggacgccagaggcctgctgagaaatctgagatggcgcgagtccaagagaggcctgagctgcgatcacgaggatctgagcctgtctggactgctggccctgttttctggcgaccccgtgatcgatcctgtgcggaatgaggtggtgttcctgtacggcgagggcatcattccagtgcggagcacaaagcctgtgggcaccagacagagcaagaaactgctggaacggcaggccagcatgggccctctgacactgatctcttgtgacctgggccagaccaacctgattgccggcagagcctctgctatcagcctgacacatggatctctgggcgtcagatccagcgtgcggattgagctggaccccgagatcatcaagagcttcgagcggctgagaaaggacgccgacagactggaaaccgagatcctgaccgccgccaaagaaaccctgagcgacgaacagaggggcgaagtgaacagccacgagaaggatagcccacagacagccaaggccagcctgtgtagagagctgggactgcaccctccatctctgccttggggacagatgggccctagcaccacctttatcgccgacatgctgatctcccacggcagggacgatgatgcctttctgagccacggcgagttccccacactggaaaagcggaagaagttcgataagcggttctgcctggaaagcagacccctgctgagcagcgagacaagaaaggccctgaacgagtccctgtgggaagtgaagagaaccagcagcgagtacgcccggctgagccagagaaagaaagagatggctagacgggccgtgaacttcgtggtcgagatctccagaagaaagaccggcctgtccaacgtgatcgtgaacatcgaggacctgaacgtgcggatctttcacggcggaggaaaacaggctcctggctgggatggcttcttcagacccaagtccgagaaccggtggttcatccaggccatccacaaggccttcagcgatctggccgctcaccacggaatccctgtgatcgagagcgaccctcagcggaccagcatgacctgtcctgagtgtggccactgcgacagcaagaaccggaatggcgttcggttcctgtgcaaaggctgtggcgcctccatggacgccgattttgatgccgcctgccggaacctggaaagagtggctctgacaggcaagcccatgcctaagcctagcacctcctgtgaaagactgctgagcgccaccaccggcaaagtgtgctctgatcactccctgtctcacgacgccatcgagaaggcttcttaa

SEQ ID NO: 1410 - DNA, 2301 bp, Unknown
  Description of Unknown: CasPhi sequence
atggaaaaagagatcaccgagctgaccaagatccgcagagagttccccaacaagaagttcagcagcaccgacatgaagaaggccggcaagctgctgaaggccgaaggacctgatgccgtgcgggacttcctgaacagctgccaagagatcatcggcgacttcaagcctccagtcaagaccaacatcgtgtccatcagcagacccttcgaggaatggcccgtgtccatggttggacgggccatccaagagtactacttcagcctgaccaaagaggaactggaaagcgttcaccccggcaccagcagcgaggaccacaagagctttttcaacatcaccggcctgagcaactacaactacaccagcgtgcagggcctgaacctgatcttcaagaacgccaaggccatctacgacggcaccctggtcaaggccaacaacaagaacaagaagctcgagaagaagtttaacgagatcaaccacaagcggagcctggaaggcctgcctatcatcacccctgatttcgaggaacccttcgacgagaacggccacctgaacaaccctccaggcatcaaccggaacatctacggctatcagggctgcgccgccaaggtgttcgtgccttctaagcacaagatggtgtccctgcctaaagagtacgagggctacaacagggaccccaacctgtctctggccggcttcagaaacagactggaaatccctgagggcgagcctggccatgtgccatggttccagagaatggatatccccgagggccagatcggacacgtgaacaagatccagcggttcaacttcgtgcacggcaagaacagcggcaaagtgaagttctccgacaagaccggcagagtgaagagataccaccacagcaagtacaaggacgctaccaagccttacaagttcctggaagagtccaagaaggtgtcagccctggacagcatcctggccatcatcacaatcggcgacgactgggtcgtgttcgacatcagaggcctgtaccggaacgtgttctacagagagctggcccagaaaggcctgacagctgtgcaactgctggacctgtttaccggcgatcccgtgatcgaccccaagaaaggcgtggtcaccttcagctacaaagagggcgtcgtccccgtctttagccagaaaatcgtgccccggttcaagagccgggacaccctggaaaagctgacctctcagggacctgtggctctgctgtctgtggacctgggacagaatgaacctgtggccgccagagtgtgcagcctgaagaacatcaacgacaagatcaccctggacaactcttgccggatcagcttcctggacgactacaagaagcagatcaaggactacagagacagcctggacgagctggaaatcaagatccggctggaagccatcaactccctcgagacaaaccagcaggtcgagatcagagatctggacgtgttcagcgccgaccgggccaaagccaataccgtggacatgtttgacatcgaccctaacctgatcagctgggactccatgagcgacgccagagtcagcacccagatcagcgacctgtacctgaagaatggcggcgacgagagccgggtgtactttgagattaacaacaaacggattaagcggagcgactacaacatcagccagctcgtgcggcccaagctgagcgatagcaccagaaagaacctgaacgacagcatctggaagctgaagcggaccagcgaggaatacctgaagctgagcaagcggaagctggaactgagcagagccgtcgtgaattacaccatccggcagagcaaactgctgagcggcatcaatgacatcgtgatcattctcgaggacctggacgtgaagaagaaattcaacggcagaggcatccgcgatatcggctgggacaacttcttcagctcccggaaagaaaaccggtggttcatccccgccttccacaagacctttagcgagctgagcagcaacaggggcctgtgcgtgatcgaagtgaatcctgcctggaccagcgccacctgtcctgattgtggcttctgcagcaaagaaaacagagatggcatcaacttcacgtgccggaagtgcggcgtgtcctaccacgccgatattgacgtggccacactgaatattgccagagtggccgtgctgggcaagcctatgtctggacctgccgacagagagagactgggcgacaccaagaaacctagagtggcccgcagcagaaagaccatgaagcggaaggacatcagcaacagcaccgtcgaggccatggttacagcttaa

SEQ ID NO: 1411 - DNA, 30 bp, Artificial Sequence; identical to SEQ ID NO: 108
  Description of Artificial Sequence: Synthetic oligonucleotide

SEQ ID NO: 1412 - DNA, 2195 bp, Artificial Sequence
  Description of Artificial Sequence: Synthetic polynucleotide
gtgtagataactacgatacgggagggcttaccatctggccccagtgctgcaatgataccgcgagacccacgctcaccggctccagatttatcagcaataaaccagccagccggaagggccgagcgcagaagtggtcctgcaactttatccgcctccatccagtctattaattgttgccgggaagctagagtaagtagttcgccagttaatagtttgcgcaacgttgttgccattgctacaggcatcgtggtgtcacgctcgtcgtttggtatggcttcattcagctccggttcccaacgatcaaggcgagttacatgatcccccatgttgtgcaaaaaagcggttagctccttcggtcctccgatcgttgtcagaagtaagttggccgcagtgttatcactcatggttatggcagcactgcataattctcttactgtcatgccatccgtaagatgcttttctgtgactggtgagtactcaaccaagtcattctgagaatagtgtatgcggcgaccgagttgctcttgcccggcgtcaatacgggataataccgcgccacatagcagaactttaaaagtgctcatcattggaaaacgttcttcggggcgaaaactctcaaggatcttaccgctgttgagatccagttcgatgtaacccactcgtgcacccaactgatcttcagcatcttttactttcaccagcgtttctgggtgagcaaaaacaggaaggcaaaatgccgcaaaaaagggaataagggcgacacggaaatgttgaatactcatactcttcctttttcaatattattgaagcatttatcagggttattgtctcatgagcggatacatatttgaatgtatttagaaaaataaacaaataggggttccgcgcacatttccccgaaaagtgccacctgacgtctaagaaaccattattatcatgacattaacctataaaaataggcgtatcacgaggccctttcgtctcgcgcgtttcggtgatgacggtgaaaacctctgacacatgcagctcccggagacggtcacagcttgtctgccatggacatgtttatattaaatactcgtattgctgttcgattatgaccgaattccctgtcgtgccagctgcattaatgaatcggccaacgcgcggggagaggcggtttgcgtattgggcgctcttccgcttcctcgctcactgactcgctgcgctcggtcgttcggctgcggcgagcggtatcagctcactcaaaggcggtaatacggttatccacagaatcaggggataacgcaggaaagaacatgtgagcaaaaggccagcaaaaggccaggaaccgtaaaaaggccgcgttgctggcgtttttccataggctccgcccccctgacgagcatcacaaaaatcgacgctcaagtcagaggtggcgaaacccgacaggactataaagataccaggcgtttccccctggaagctccctcgtgcgctctcctgttccgaccctgccgcttaccggatacctgtccgcctttctcccttcgggaagcgtggcgctttctcatagctcacgctgtaggtatctcagttcggtgtaggtcgttcgctccaagctgggctgtgtgcacgaaccccccgttcagcccgaccgctgcgccttatccggtaactatcgtcttgagtccaacccggtaagacacgacttatcgccactggcagcagccactggtaacaggattagcagagcgaggtatgtaggcggtgctacagagttcttgaagtggtggcctaactacggctacactagaagaacagtatttggtatctgcgctctgctgaagccagttaccttcggaaaaagagttggtagctcttgatccggcaaacaaaccaccgctggtagcggtggtttttttgtttgcaagcagcagattacgcgcagaaaaaaaggatctcaagaagatcctttgatcttttctacggggtctgacgctcagtggaacgaaaactcacgttaagggattttggtcatgagattatcaaaaaggatcttcacctagatccttttaaattaaaaatgaagttttaaatcaatctaaagtatatatgagtaaacttggtctgacagttaccaatgcttaatcagtgaggcacctatctcagcgatctgtctatttcgttcatccatagttgcctgactccccgtc

SEQ ID NO: 1413 - DNA, 45 bp, Artificial Sequence
  Description of Artificial Sequence: Synthetic oligonucleotide
acgcgttttagaagagcagcttgttaaggccaaagaacagattga

SEQ ID NO: 1414 - DNA, 44 bp, Artificial Sequence
  Description of Artificial Sequence: Synthetic oligonucleotide
aaagatttgtccttggagaacggtgctcatgcttacaaccggga

SEQ ID NO: 1415 - DNA, 30 bp, Artificial Sequence
  Description of Artificial Sequence: Synthetic oligonucleotide
ttgcccaggatgttgccatcctccttgaaa

SEQ ID NO: 1416 - DNA, 20 bp, Artificial Sequence
  Description of Artificial Sequence: Synthetic oligonucleotide
ttaaggccaaagaacagatt

SEQ ID NO: 1417 - DNA, 20 bp, Artificial Sequence
  Description of Artificial Sequence: Synthetic oligonucleotide
cgtgatggtctcgattgagt

SEQ ID NO: 1418 - DNA, 20 bp, Artificial Sequence
  Description of Artificial Sequence: Synthetic oligonucleotide
aagaagtcgtgctgcttcat

SEQ ID NO: 1419 - DNA, 20 bp, Artificial Sequence
  Description of Artificial Sequence: Synthetic oligonucleotide
atctgcaccaccggcaagct

SEQ ID NO: 1420 - DNA, 20 bp, Artificial Sequence
  Description of Artificial Sequence: Synthetic oligonucleotide
tggcggatcttgaagttcac

SEQ ID NO: 1421 - DNA, 20 bp, Artificial Sequence
  Description of Artificial Sequence: Synthetic oligonucleotide
ccgtaggtggcatcgccctc

SEQ ID NO: 1422 - DNA, 20 bp, Artificial Sequence
  Description of Artificial Sequence: Synthetic oligonucleotide
acgtcgccgtccagctcgac

SEQ ID NO: 1423 - DNA, 20 bp, Artificial Sequence
  Description of Artificial Sequence: Synthetic oligonucleotide
aagaagatggtgcgctcctg

SEQ ID NO: 1424 - DNA, 20 bp, Artificial Sequence
  Description of Artificial Sequence: Synthetic oligonucleotide
gaagagcagcttgttaaggc

SEQ ID NO: 1425 - DNA, 20 bp, Artificial Sequence
  Description of Artificial Sequence: Synthetic oligonucleotide
gccttaacaagctgctcttc

SEQ ID NO: 1426 - DNA, 20 bp, Artificial Sequence
  Description of Artificial Sequence: Synthetic oligonucleotide
attgatcaggggccagctat

SEQ ID NO: 1427 - DNA, 20 bp, Artificial Sequence
  Description of Artificial Sequence: Synthetic oligonucleotide
acgcgtactcttcctatagc

SEQ ID NO: 1428 - DNA, 20 bp, Artificial Sequence
  Description of Artificial Sequence: Synthetic oligonucleotide
cgtgatggtctcgattgagt

SEQ ID NO: 1429 - RNA, 20 nt, Artificial Sequence
  Description of Artificial Sequence: Synthetic oligonucleotide
gggccgagaugucucgcucc

SEQ ID NO: 1430 - RNA, 56 nt, Artificial Sequence
  Description of Artificial Sequence: Synthetic oligonucleotide
cuuucaagacuaauagauugcuccuuacgaggagacgggccgagaugucucgcucc

SEQ ID NO: 1431 - DNA, 20 bp, Artificial Sequence
  Description of Artificial Sequence: Synthetic oligonucleotide
ggccgagatgtctcgctccg

SEQ ID NO: 1432 - RNA, 56 nt, Artificial Sequence
  Description of Artificial Sequence: Synthetic oligonucleotide
cuuucaagacuaauagauugcuccuuacgaggagacgagucucucagcugguacac

SEQ ID NO: 1433 - RNA, 20 nt, Artificial Sequence
  Description of Artificial Sequence: Synthetic oligonucleotide
auugcuccuuacgaggagac

SEQ ID NO: 1434 - RNA, 20 nt, Artificial Sequence
  Description of Artificial Sequence: Synthetic oligonucleotide
cagugggggugaauucagug

SEQ ID NO: 1435 - RNA, 40 nt, Artificial Sequence
  Description of Artificial Sequence: Synthetic oligonucleotide
auugcuccuuacgaggagaccagugggggugaauucagug

SEQ ID NO: 1436 - RNA, 20 nt, Artificial Sequence
  Description of Artificial Sequence: Synthetic oligonucleotide
gagucucucagcugguacac

SEQ ID NO: 1437 - RNA, 40 nt, Artificial Sequence
  Description of Artificial Sequence: Synthetic oligonucleotide
auugcuccuuacgaggagacgagucucucagcugguacac

SEQ ID NO: 1438 - RNA, 17 nt, Artificial Sequence
  Description of Artificial Sequence: Synthetic oligonucleotide
cagugggggugaauuca

SEQ ID NO: 1439 - RNA, 37 nt, Artificial Sequence
  Description of Artificial Sequence: Synthetic oligonucleotide
auugcuccuuacgaggagaccagugggggugaauuca

SEQ ID NO: 1440 - RNA, 17 nt, Artificial Sequence
  Description of Artificial Sequence: Synthetic oligonucleotide
cagugggggugaauuca

SEQ ID NO: 1441 - RNA, 37 nt, Artificial Sequence
  Description of Artificial Sequence: Synthetic oligonucleotide
auugcuccuuacgaggagacgagucucucagcuggua

SEQ ID NO: 1442 - RNA, 56 nt, Artificial Sequence
  Description of Artificial Sequence: Synthetic oligonucleotide
cuuucaagacuaauagauugcuccuuacgaggagacaggaauacaugguacacguu

SEQ ID NO: 1443 - RNA, 45 nt, Artificial Sequence
  Description of Artificial Sequence: Synthetic oligonucleotide
aauagauugcuccuuacgaggagacaggaauacaugguacacguu

SEQ ID NO: 1444 - DNA, 45 bp, Artificial Sequence
  Description of Artificial Sequence: Synthetic oligonucleotide
  Description of Combined DNA/RNA Molecule: Synthetic oligonucleotide
aauagauugcuccuuacgaggagacaggaauacaugguacacgtt

SEQ ID NO: 1445 - RNA, 56 nt, Artificial Sequence; identical to SEQ ID NO: 1442
  Description of Artificial Sequence: Synthetic oligonucleotide

SEQ ID NO: 1446 - RNA, 45 nt, Artificial Sequence; identical to SEQ ID NO: 1443
  Description of Artificial Sequence: Synthetic oligonucleotide

SEQ ID NO: 1447 - RNA, 56 nt, Artificial Sequence; identical to SEQ ID NO: 1442
  Description of Artificial Sequence: Synthetic oligonucleotide

SEQ ID NO: 1448 - RNA, 45 nt, Artificial Sequence; identical to SEQ ID NO: 1443
  Description of Artificial Sequence: Synthetic oligonucleotide

SEQ ID NO: 1449 - RNA, 56 nt, Artificial Sequence; identical to SEQ ID NO: 1442
  Description of Artificial Sequence: Synthetic oligonucleotide

SEQ ID NO: 1450 - RNA, 45 nt, Artificial Sequence; identical to SEQ ID NO: 1443
  Description of Artificial Sequence: Synthetic oligonucleotide

SEQ ID NO: 1451 - RNA, 57 nt, Artificial Sequence
  Description of Artificial Sequence: Synthetic oligonucleotide
cuuucaagacuaauagauugcuccuuacgaggagacaggaauacaugguacacguug

SEQ ID NO: 1452 - RNA, 46 nt, Artificial Sequence
  Description of Artificial Sequence: Synthetic oligonucleotide
aauagauugcuccuuacgaggagacaggaauacaugguacacguug

SEQ ID NO: 1453 - DNA, 56 bp, Artificial Sequence
  Description of Artificial Sequence: Synthetic oligonucleotide
  Description of Combined DNA/RNA Molecule: Synthetic oligonucleotide
cuuucaagacuaauagauugcuccuuacgaggagacaggaauacaugguacacgtt

SEQ ID NO: 1454 - DNA, 56 bp, Artificial Sequence; identical to SEQ ID NO: 1453
  Description of Artificial Sequence: Synthetic oligonucleotide
  Description of Combined DNA/RNA Molecule: Synthetic oligonucleotide

SEQ ID NO: 1455 - DNA, 56 bp, Artificial Sequence; identical to SEQ ID NO: 1453
  Description of Artificial Sequence: Synthetic oligonucleotide
  Description of Combined DNA/RNA Molecule: Synthetic oligonucleotide

SEQ ID NO: 1456 - DNA, 56 bp, Artificial Sequence; identical to SEQ ID NO: 1453
  Description of Artificial Sequence: Synthetic oligonucleotide
  Description of Combined DNA/RNA Molecule: Synthetic oligonucleotide

SEQ ID NO: 1457 - DNA, 56 bp, Artificial Sequence; identical to SEQ ID NO: 1453
  Description of Artificial Sequence: Synthetic oligonucleotide
  Description of Combined DNA/RNA Molecule: Synthetic oligonucleotide

SEQ ID NO: 1458 - DNA, 56 bp, Artificial Sequence; identical to SEQ ID NO: 1453
  Description of Artificial Sequence: Synthetic oligonucleotide
  Description of Combined DNA/RNA Molecule: Synthetic oligonucleotide

SEQ ID NO: 1459 - DNA, 56 bp, Artificial Sequence; identical to SEQ ID NO: 1453
  Description of Artificial Sequence: Synthetic oligonucleotide
  Description of Combined DNA/RNA Molecule: Synthetic oligonucleotide

SEQ ID NO: 1460 - DNA, 56 bp, Artificial Sequence; identical to SEQ ID NO: 1453
  Description of Artificial Sequence: Synthetic oligonucleotide
  Description of Combined DNA/RNA Molecule: Synthetic oligonucleotide

SEQ ID NO: 1461 - DNA, 45 bp, Artificial Sequence; identical to SEQ ID NO: 1444
  Description of Artificial Sequence: Synthetic oligonucleotide
  Description of Combined DNA/RNA Molecule: Synthetic oligonucleotide

SEQ ID NO: 1462 - RNA, 52 nt, Artificial Sequence
  Description of Artificial Sequence: Synthetic oligonucleotide
aauagauugcuccuuacgaggagacaggaauacaugguacacguuaaaaaaa

SEQ ID NO: 1463 - DNA, 56 bp, Artificial Sequence; identical to SEQ ID NO: 1453
  Description of Artificial Sequence: Synthetic oligonucleotide
  Description of Combined DNA/RNA Molecule: Synthetic oligonucleotide

SEQ ID NO: 1464 - RNA, 45 nt, Artificial Sequence; identical to SEQ ID NO: 1443
  Description of Artificial Sequence: Synthetic oligonucleotide

SEQ ID NO: 1465 - RNA, 56 nt, Artificial Sequence; identical to SEQ ID NO: 1442
  Description of Artificial Sequence: Synthetic oligonucleotide

SEQ ID NO: 1466 - RNA, 35 nt, Artificial Sequence
  Description of Artificial Sequence: Synthetic oligonucleotide
uuucaagacuaauagauugcuccuuacgaggagac

SEQ ID NO: 1467 - RNA, 34 nt, Artificial Sequence
  Description of Artificial Sequence: Synthetic oligonucleotide
uucaagacuaauagauugcuccuuacgaggagac

SEQ ID NO: 1468 - RNA, 33 nt, Artificial Sequence
  Description of Artificial Sequence: Synthetic oligonucleotide
ucaagacuaauagauugcuccuuacgaggagac

SEQ ID NO: 1469 - RNA, 32 nt, Artificial Sequence
  Description of Artificial Sequence: Synthetic oligonucleotide
caagacuaauagauugcuccuuacgaggagac

SEQ ID NO: 1470 - RNA, 31 nt, Artificial Sequence
  Description of Artificial Sequence: Synthetic oligonucleotide
aagacuaauagauugcuccuuacgaggagac

SEQ ID NO: 1471 - RNA, 30 nt, Artificial Sequence
  Description of Artificial Sequence: Synthetic oligonucleotide
agacuaauagauugcuccuuacgaggagac

SEQ ID NO: 1472 - RNA, 29 nt, Artificial Sequence
  Description of Artificial Sequence: Synthetic oligonucleotide
gacuaauagauugcuccuuacgaggagac

SEQ ID NO: 1473 - RNA, 28 nt, Artificial Sequence
  Description of Artificial Sequence: Synthetic oligonucleotide
acuaauagauugcuccuuacgaggagac

SEQ ID NO: 1474 - RNA, 27 nt, Artificial Sequence
  Description of Artificial Sequence: Synthetic oligonucleotide
cuaauagauugcuccuuacgaggagac

SEQ ID NO: 1475 - RNA, 26 nt, Artificial Sequence
  Description of Artificial Sequence: Synthetic oligonucleotide
uaauagauugcuccuuacgaggagac

SEQ ID NO: 1476 - RNA, 25 nt, Artificial Sequence
  Description of Artificial Sequence: Synthetic oligonucleotide
aauagauugcuccuuacgaggagac

SEQ ID NO: 1477 - RNA, 24 nt, Artificial Sequence
  Description of Artificial Sequence: Synthetic oligonucleotide
auagauugcuccuuacgaggagac

SEQ ID NO: 1478 - RNA, 23 nt, Artificial Sequence
  Description of Artificial Sequence: Synthetic oligonucleotide
uagauugcuccuuacgaggagac

SEQ ID NO: 1479 - RNA, 22 nt, Artificial Sequence
  Description of Artificial Sequence: Synthetic oligonucleotide
agauugcuccuuacgaggagac

SEQ ID NO: 1480 - RNA, 21 nt, Artificial Sequence
  Description of Artificial Sequence: Synthetic oligonucleotide
gauugcuccuuacgaggagac

SEQ ID NO: 1481 - RNA, 20 nt, Artificial Sequence
  Description of Artificial Sequence: Synthetic oligonucleotide
auugcuccuuacgaggagac

SEQ ID NO: 1482 - RNA, 30 nt, Artificial Sequence
  Description of Artificial Sequence: Synthetic oligonucleotide
aggaauacaugguacacguugaagaacauu

SEQ ID NO: 1483 - RNA, 29 nt, Artificial Sequence
  Description of Artificial Sequence: Synthetic oligonucleotide
aggaauacaugguacacguugaagaacau

SEQ ID NO: 1484 - RNA, 28 nt, Artificial Sequence
  Description of Artificial Sequence: Synthetic oligonucleotide
aggaauacaugguacacguugaagaaca

SEQ ID NO: 1485 - RNA, 27 nt, Artificial Sequence
  Description of Artificial Sequence: Synthetic oligonucleotide
aggaauacaugguacacguugaagaac

SEQ ID NO: 1486 - RNA, 26 nt, Artificial Sequence
  Description of Artificial Sequence: Synthetic oligonucleotide
aggaauacaugguacacguugaagaa

SEQ ID NO: 1487 - RNA, 25 nt, Artificial Sequence
  Description of Artificial Sequence: Synthetic oligonucleotide
aggaauacaugguacacguugaaga

SEQ ID NO: 1488 - RNA, 24 nt, Artificial Sequence
  Description of Artificial Sequence: Synthetic oligonucleotide
aggaauacaugguacacguugaag

SEQ ID NO: 1489 - RNA, 23 nt, Artificial Sequence
  Description of Artificial Sequence: Synthetic oligonucleotide
aggaauacaugguacacguugaa

SEQ ID NO: 1490 - RNA, 22 nt, Artificial Sequence
  Description of Artificial Sequence: Synthetic oligonucleotide
aggaauacaugguacacguuga

SEQ ID NO: 1491 - RNA, 21 nt, Artificial Sequence
  Description of Artificial Sequence: Synthetic oligonucleotide
aggaauacaugguacacguug

SEQ ID NO: 1492 - RNA, 20 nt, Artificial Sequence
  Description of Artificial Sequence: Synthetic oligonucleotide
aggaauacaugguacacguu

SEQ ID NO: 1493 - RNA, 19 nt, Artificial Sequence
  Description of Artificial Sequence: Synthetic oligonucleotide
aggaauacaugguacacgu

SEQ ID NO: 1494 - RNA, 18 nt, Artificial Sequence
  Description of Artificial Sequence: Synthetic oligonucleotide
aggaauacaugguacacg

SEQ ID NO: 1495 - RNA, 17 nt, Artificial Sequence
  Description of Artificial Sequence: Synthetic oligonucleotide
aggaauacaugguacac

SEQ ID NO: 1496 - RNA, 16 nt, Artificial Sequence
  Description of Artificial Sequence: Synthetic oligonucleotide
aggaauacaugguaca

SEQ ID NO: 1497 - RNA, 15 nt, Artificial Sequence
  Description of Artificial Sequence: Synthetic oligonucleotide
aggaauacaugguac

SEQ ID NO: 1498 - RNA, 20 nt, Artificial Sequence
  Description of Artificial Sequence: Synthetic oligonucleotide
aggaauacaugguacacguu

SEQ ID NO: 1499 - RNA, 66 nt, Artificial Sequence
  Description of Artificial Sequence: Synthetic oligonucleotide
cuuucaagacuaauagauugcuccuuacgaggagacaggaauacaugguacacguugaagaacauu

SEQ ID NO: 1500 - RNA, 65 nt, Artificial Sequence
  Description of Artificial Sequence: Synthetic oligonucleotide
cuuucaagacuaauagauugcuccuuacgaggagacaggaauacaugguacacguugaagaacau

SEQ ID NO: 1501 - RNA, 64 nt, Artificial Sequence
  Description of Artificial Sequence: Synthetic oligonucleotide
cuuucaagacuaauagauugcuccuuacgaggagacaggaauacaugguacacguugaagaaca

SEQ ID NO: 1502 - RNA, 63 nt, Artificial Sequence
  Description of Artificial Sequence: Synthetic oligonucleotide
cuuucaagacuaauagauugcuccuuacgaggagacaggaauacaugguacacguugaagaac

SEQ ID NO: 1503 - RNA, 62 nt, Artificial Sequence
  Description of Artificial Sequence: Synthetic oligonucleotide
cuuucaagacuaauagauugcuccuuacgaggagacaggaauacaugguacacguugaagaa

SEQ ID NO: 1504 - RNA, 61 nt, Artificial Sequence
  Description of Artificial Sequence: Synthetic oligonucleotide
cuuucaagacuaauagauugcuccuuacgaggagacaggaauacaugguacacguugaaga

SEQ ID NO: 1505 - RNA, 60 nt, Artificial Sequence
  Description of Artificial Sequence: Synthetic oligonucleotide
cuuucaagacuaauagauugcuccuuacgaggagacaggaauacaugguacacguugaag

SEQ ID NO: 1506 - RNA, 59 nt, Artificial Sequence
  Description of Artificial Sequence: Synthetic oligonucleotide
cuuucaagacuaauagauugcuccuuacgaggagacaggaauacaugguacacguugaa

SEQ ID NO: 1507 - RNA, 58 nt, Artificial Sequence
  Description of Artificial Sequence: Synthetic oligonucleotide
cuuucaagacuaauagauugcuccuuacgaggagacaggaauacaugguacacguuga

SEQ ID NO: 1508 - RNA, 57 nt, Artificial Sequence; identical to SEQ ID NO: 1451
  Description of Artificial Sequence: Synthetic oligonucleotide

SEQ ID NO: 1509 - RNA, 56 nt, Artificial Sequence; identical to SEQ ID NO: 1442
  Description of Artificial Sequence: Synthetic oligonucleotide

SEQ ID NO: 1510 - RNA, 55 nt, Artificial Sequence
  Description of Artificial Sequence: Synthetic oligonucleotide
cuuucaagacuaauagauugcuccuuacgaggagacaggaauacaugguacacgu

SEQ ID NO: 1511 - RNA, 54 nt, Artificial Sequence
  Description of Artificial Sequence: Synthetic oligonucleotide
cuuucaagacuaauagauugcuccuuacgaggagacaggaauacaugguacacg

SEQ ID NO: 1512 - RNA, 53 nt, Artificial Sequence
  Description of Artificial Sequence: Synthetic oligonucleotide
cuuucaagacuaauagauugcuccuuacgaggagacaggaauacaugguacac

SEQ ID NO: 1513 - RNA, 52 nt, Artificial Sequence
  Description of Artificial Sequence: Synthetic oligonucleotide
cuuucaagacuaauagauugcuccuuacgaggagacaggaauacaugguaca

SEQ ID NO: 1514 - RNA, 51 nt, Artificial Sequence
  Description of Artificial Sequence: Synthetic oligonucleotide
cuuucaagacuaauagauugcuccuuacgaggagacaggaauacaugguac

SEQ ID NO: 1515 - RNA, 55 nt, Artificial Sequence
  Description of Artificial Sequence: Synthetic oligonucleotide
uuucaagacuaauagauugcuccuuacgaggagacaggaauacaugguacacguu

SEQ ID NO: 1516 - RNA, 54 nt, Artificial Sequence
  Description of Artificial Sequence: Synthetic oligonucleotide
uucaagacuaauagauugcuccuuacgaggagacaggaauacaugguacacguu

SEQ ID NO: 1517 - RNA, 53 nt, Artificial Sequence
  Description of Artificial Sequence: Synthetic oligonucleotide
ucaagacuaauagauugcuccuuacgaggagacaggaauacaugguacacguu

SEQ ID NO: 1518 - RNA, 52 nt, Artificial Sequence
  Description of Artificial Sequence: Synthetic oligonucleotide
caagacuaauagauugcuccuuacgaggagacaggaauacaugguacacguu

SEQ ID NO: 1519 - RNA, 51 nt, Artificial Sequence
  Description of Artificial Sequence: Synthetic oligonucleotide
aagacuaauagauugcuccuuacgaggagacaggaauacaugguacacguu

SEQ ID NO: 1520 - RNA, 50 nt, Artificial Sequence
  Description of Artificial Sequence: Synthetic oligonucleotide
agacuaauagauugcuccuuacgaggagacaggaauacaugguacacguu

SEQ ID NO: 1521 - RNA, 49 nt, Artificial Sequence
  Description of Artificial Sequence: Synthetic oligonucleotide
gacuaauagauugcuccuuacgaggagacaggaauacaugguacacguu

SEQ ID NO: 1522 - RNA, 48 nt, Artificial Sequence
  Description of Artificial Sequence: Synthetic oligonucleotide
acuaauagauugcuccuuacgaggagacaggaauacaugguacacguu

SEQ ID NO: 1523 - RNA, 47 nt, Artificial Sequence
  Description of Artificial Sequence: Synthetic oligonucleotide
cuaauagauugcuccuuacgaggagacaggaauacaugguacacguu

SEQ ID NO: 1524 - RNA, 46 nt, Artificial Sequence
  Description of Artificial Sequence: Synthetic oligonucleotide
uaauagauugcuccuuacgaggagacaggaauacaugguacacguu

SEQ ID NO: 1525 - RNA, 45 nt, Artificial Sequence; identical to SEQ ID NO: 1443
  Description of Artificial Sequence: Synthetic oligonucleotide

SEQ ID NO: 1526 - RNA, 44 nt, Artificial Sequence
  Description of Artificial Sequence: Synthetic oligonucleotide
auagauugcuccuuacgaggagacaggaauacaugguacacguu

SEQ ID NO: 1527 - RNA, 43 nt, Artificial Sequence
  Description of Artificial Sequence: Synthetic oligonucleotide
uagauugcuccuuacgaggagacaggaauacaugguacacguu

SEQ ID NO: 1528 - RNA, 42 nt, Artificial Sequence
  Description of Artificial Sequence: Synthetic oligonucleotide
agauugcuccuuacgaggagacaggaauacaugguacacguu

SEQ ID NO: 1529 - RNA, 41 nt, Artificial Sequence
  Description of Artificial Sequence: Synthetic oligonucleotide
gauugcuccuuacgaggagacaggaauacaugguacacguu

SEQ ID NO: 1530 - RNA, 40 nt, Artificial Sequence
  Description of Artificial Sequence: Synthetic oligonucleotide
auugcuccuuacgaggagacaggaauacaugguacacguu

SEQ ID NO: 1531 - DNA, 24 bp, Artificial Sequence
  Description of Artificial Sequence: Synthetic oligonucleotide
atagattgctccttacgaggagac

SEQ ID NO: 1532 - RNA, 56 nt, Artificial Sequence
  Description of Artificial Sequence: Synthetic oligonucleotide
cuuucaagacuaauagauugcuccuuacgaggagacagcaaggacuggucuuucua

SEQ ID NO: 1533 - DNA, 37 bp, Artificial Sequence
  Description of Artificial Sequence: Synthetic oligonucleotide
attgctccttacgaggagactggatatctgtgggaca

SEQ ID NO: 1534 - DNA, 37 bp, Artificial Sequence
  Description of Artificial Sequence: Synthetic oligonucleotide
attgctccttacgaggagactcccacagatatccaga

SEQ ID NO: 1535 - DNA, 37 bp, Artificial Sequence
  Description of Artificial Sequence: Synthetic oligonucleotide
attgctccttacgaggagacgagtctctcagctggta

SEQ ID NO: 1536 - DNA, 37 bp, Artificial Sequence
  Description of Artificial Sequence: Synthetic oligonucleotide
attgctccttacgaggagacagagtctctcagctggt

SEQ ID NO: 1537 - DNA, 37 bp, Artificial Sequence
  Description of Artificial Sequence: Synthetic oligonucleotide
attgctccttacgaggagactcactggatttagagtc

SEQ ID NO: 1538 - DNA, 37 bp, Artificial Sequence
  Description of Artificial Sequence: Synthetic oligonucleotide
attgctccttacgaggagacagaatcaaaatcggtga

SEQ ID NO: 1539 - DNA, 37 bp, Artificial Sequence
  Description of Artificial Sequence: Synthetic oligonucleotide
attgctccttacgaggagacgagaatcaaaatcggtg

SEQ ID NO: 1540 - DNA, 37 bp, Artificial Sequence
  Description of Artificial Sequence: Synthetic oligonucleotide
attgctccttacgaggagacaccgattttgattctca

SEQ ID NO: 1541 - DNA, 37 bp, Artificial Sequence
  Description of Artificial Sequence: Synthetic oligonucleotide
attgctccttacgaggagactttgagaatcaaaatcg

SEQ ID NO: 1542 - DNA, 37 bp, Artificial Sequence
  Description of Artificial Sequence: Synthetic oligonucleotide
attgctccttacgaggagacgtttgagaatcaaaatc

SEQ ID NO: 1543 - DNA, 37 bp, Artificial Sequence
  Description of Artificial Sequence: Synthetic oligonucleotide
attgctccttacgaggagactgattctcaaacaaatg

SEQ ID NO: 1544 - DNA, 37 bp, Artificial Sequence
  Description of Artificial Sequence: Synthetic oligonucleotide
attgctccttacgaggagacgattctcaaacaaatgt

SEQ ID NO: 1545 - DNA, 37 bp, Artificial Sequence
  Description of Artificial Sequence: Synthetic oligonucleotide
attgctccttacgaggagacattctcaaacaaatgtg

SEQ ID NO: 1546 - DNA, 37 bp, Artificial Sequence
  Description of Artificial Sequence: Synthetic oligonucleotide
attgctccttacgaggagactgacacatttgtttgag

SEQ ID NO: 1547 - DNA, 37 bp, Artificial Sequence
  Description of Artificial Sequence: Synthetic oligonucleotide
attgctccttacgaggagactcaaacaaatgtgtcac

SEQ ID NO: 1548 - DNA, 37 bp, Artificial Sequence
  Description of Artificial Sequence: Synthetic oligonucleotide
attgctccttacgaggagacgtgacacatttgtttga

SEQ ID NO: 1549 - DNA, 37 bp, Artificial Sequence
  Description of Artificial Sequence: Synthetic oligonucleotide
attgctccttacgaggagacctttgtgacacatttgt

SEQ ID NO: 1550 - DNA, 37 bp, Artificial Sequence
  Description of Artificial Sequence: Synthetic oligonucleotide
attgctccttacgaggagactgatgtgtatatcacag

SEQ ID NO: 1551 - DNA, 37 bp, Artificial Sequence
  Description of Artificial Sequence: Synthetic oligonucleotide
attgctccttacgaggagactctgtgatatacacatc

SEQ ID NO: 1552 - DNA, 37 bp, Artificial Sequence
  Description of Artificial Sequence: Synthetic oligonucleotide
attgctccttacgaggagacgtctgtgatatacacat

SEQ ID NO: 1553 - DNA, 37 bp, Artificial Sequence
  Description of Artificial Sequence: Synthetic oligonucleotide
attgctccttacgaggagactgtctgtgatatacaca

SEQ ID NO: 1554 - DNA, 37 bp, Artificial Sequence
  Description of Artificial Sequence: Synthetic oligonucleotide
attgctccttacgaggagacaagtccatagacctcat

SEQ ID NO: 1555 - DNA, 37 bp, Artificial Sequence
  Description of Artificial Sequence: Synthetic oligonucleotide
attgctccttacgaggagacctcttgaagtccataga

SEQ ID NO: 1556 - DNA, 37 bp, Artificial Sequence
  Description of Artificial Sequence: Synthetic oligonucleotide
attgctccttacgaggagacaagagcaacagtgctgt

SEQ ID NO: 1557 - DNA, 37 bp, Artificial Sequence
  Description of Artificial Sequence: Synthetic oligonucleotide
attgctccttacgaggagacctccaggccacagcact

SEQ ID NO: 1558 - DNA, 37 bp, Artificial Sequence
  Description of Artificial Sequence: Synthetic oligonucleotide
attgctccttacgaggagacttgctccaggccacagc

SEQ ID NO: 1559 - DNA, 37 bp, Artificial Sequence
  Description of Artificial Sequence: Synthetic oligonucleotide
attgctccttacgaggagacgttgctccaggccacag

SEQ ID NO: 1560 - DNA, 37 bp, Artificial Sequence
  Description of Artificial Sequence: Synthetic oligonucleotide
attgctccttacgaggagaccacatgcaaagtcagat

SEQ ID NO: 1561 - DNA, 37 bp, Artificial Sequence
  Description of Artificial Sequence: Synthetic oligonucleotide
attgctccttacgaggagacgcacatgcaaagtcaga

SEQ ID NO: 1562 - DNA, 37 bp, Artificial Sequence
  Description of Artificial Sequence: Synthetic oligonucleotide
attgctccttacgaggagacgcatgtgcaaacgcctt

SEQ ID NO: 1563 - DNA, 37 bp, Artificial Sequence
  Description of Artificial Sequence: Synthetic oligonucleotide
attgctccttacgaggagacaaggcgtttgcacatgc

SEQ ID NO: 1564 - DNA, 37 bp, Artificial Sequence
  Description of Artificial Sequence: Synthetic oligonucleotide
attgctccttacgaggagaccatgtgcaaacgccttc

SEQ ID NO: 1565 - DNA, 37 bp, Artificial Sequence
  Description of Artificial Sequence: Synthetic oligonucleotide
attgctccttacgaggagacttgaaggcgtttgcaca

SEQ ID NO: 1566 - DNA, 37 bp, Artificial Sequence
  Description of Artificial Sequence: Synthetic oligonucleotide
attgctccttacgaggagacaacaacagcattattcc

SEQ ID NO: 1567 - DNA, 37 bp, Artificial Sequence
  Description of Artificial Sequence: Synthetic oligonucleotide
attgctccttacgaggagactggaataatgctgttgt

SEQ ID NO: 1568 - DNA, 37 bp, Artificial Sequence
  Description of Artificial Sequence: Synthetic oligonucleotide
attgctccttacgaggagacttccagaagacaccttc

SEQ ID NO: 1569 - DNA, 37 bp, Artificial Sequence
  Description of Artificial Sequence: Synthetic oligonucleotide
attgctccttacgaggagaccagaagacaccttcttc

SEQ ID NO: 1570 - DNA, 37 bp, Artificial Sequence
  Description of Artificial Sequence: Synthetic oligonucleotide
attgctccttacgaggagaccctgggctggggaagaa

SEQ ID NO: 1571 - DNA, 37 bp, Artificial Sequence
  Description of Artificial Sequence: Synthetic oligonucleotide
attgctccttacgaggagacttccccagcccaggtaa

SEQ ID NO: 1572 - DNA, 37 bp, Artificial Sequence
  Description of Artificial Sequence: Synthetic oligonucleotide
attgctccttacgaggagaccccagcccaggtaaggg

SEQ ID NO: 1573 - DNA, 37 bp, Artificial Sequence
  Description of Artificial Sequence: Synthetic oligonucleotide
attgctccttacgaggagactaaaaggaaaaacagac

SEQ ID NO: 1574 - DNA, 37 bp, Artificial Sequence
  Description of Artificial Sequence: Synthetic oligonucleotide
attgctccttacgaggagacctaaaaggaaaaacaga

SEQ ID NO: 1575 - DNA, 37 bp, Artificial Sequence
  Description of Artificial Sequence: Synthetic oligonucleotide
attgctccttacgaggagacttccttttagaaagttc

SEQ ID NO: 1576 - DNA, 37 bp, Artificial Sequence
  Description of Artificial Sequence: Synthetic oligonucleotide
attgctccttacgaggagactccttttagaaagttcc

SEQ ID NO: 1577 - DNA, 37 bp, Artificial Sequence
  Description of Artificial Sequence: Synthetic oligonucleotide
attgctccttacgaggagacccttttagaaagttcct

SEQ ID NO: 1578 - DNA, 37 bp, Artificial Sequence
  Description of Artificial Sequence: Synthetic oligonucleotide
attgctccttacgaggagaccttttagaaagttcctg

SEQ ID NO: 1579 - DNA, 37 bp, Artificial Sequence
  Description of Artificial Sequence: Synthetic oligonucleotide
attgctccttacgaggagactagaaagttcctgtgat

SEQ ID NO: 1580 - DNA, 37 bp, Artificial Sequence
  Description of Artificial Sequence: Synthetic oligonucleotide
attgctccttacgaggagacagaaagttcctgtgatg

SEQ ID NO: 1581 - DNA, 37 bp, Artificial Sequence
  Description of Artificial Sequence: Synthetic oligonucleotide
attgctccttacgaggagacgaaagttcctgtgatgt

SEQ ID NO: 1582 - DNA, 37 bp, Artificial Sequence
  Description of Artificial Sequence: Synthetic oligonucleotide
attgctccttacgaggagacacatcacaggaactttc

SEQ ID NO: 1583 - DNA, 37 bp, Artificial Sequence
  Description of Artificial Sequence: Synthetic oligonucleotide
attgctccttacgaggagacctgtgatgtcaagctgg

SEQ ID NO: 1584 - DNA, 37 bp, Artificial Sequence
  Description of Artificial Sequence: Synthetic oligonucleotide
attgctccttacgaggagactcgaccagcttgacatc

SEQ ID NO: 1585 - DNA, 37 bp, Artificial Sequence
  Description of Artificial Sequence: Synthetic oligonucleotide
attgctccttacgaggagacctcgaccagcttgacat

SEQ ID NO: 1586 - DNA, 37 bp, Artificial Sequence
  Description of Artificial Sequence: Synthetic oligonucleotide
attgctccttacgaggagactctcgaccagcttgaca

SEQ ID NO: 1587 - DNA, 37 bp, Artificial Sequence
  Description of Artificial Sequence: Synthetic oligonucleotide
attgctccttacgaggagacaaagcttttctcgacca

SEQ ID NO: 1588 - DNA, 37 bp, Artificial Sequence
  Description of Artificial Sequence: Synthetic oligonucleotide
attgctccttacgaggagaccaaagcttttctcgacc

SEQ ID NO: 1589 - DNA, 37 bp, Artificial Sequence
  Description of Artificial Sequence: Synthetic oligonucleotide
attgctccttacgaggagaccctgtttcaaagctttt

SEQ ID NO: 1590 - DNA, 37 bp, Artificial Sequence
  Description of Artificial Sequence: Synthetic oligonucleotide
attgctccttacgaggagacgaaacaggtaagacagg

SEQ ID NO: 1591 - DNA, 37 bp, Artificial Sequence
  Description of Artificial Sequence: Synthetic oligonucleotide
attgctccttacgaggagacaaacaggtaagacaggg

SEQ ID NO: 1592 - DNA, 37 bp, Artificial Sequence
  Description of Artificial Sequence: Synthetic oligonucleotide
attgctccttacgaggagaccatccatccgacattga

SEQ ID NO: 1593 - DNA, 37 bp, Artificial Sequence
  Description of Artificial Sequence: Synthetic oligonucleotide
attgctccttacgaggagacatccatccgacattgaa

SEQ ID NO: 1594 - DNA, 37 bp, Artificial Sequence
  Description of Artificial Sequence: Synthetic oligonucleotide
attgctccttacgaggagacagtaagtcaacttcaat

SEQ ID NO: 1595 - DNA, 37 bp, Artificial Sequence
  Description of Artificial Sequence: Synthetic oligonucleotide
attgctccttacgaggagacttcagtaagtcaacttc

SEQ ID NO: 1596 - DNA, 37 bp, Artificial Sequence
  Description of Artificial Sequence: Synthetic oligonucleotide
attgctccttacgaggagacaagttgacttactgaag

SEQ ID NO: 1597 - DNA, 37 bp, Artificial Sequence
  Description of Artificial Sequence: Synthetic oligonucleotide
attgctccttacgaggagacacttactgaagaatgga

SEQ ID NO: 1598 - DNA, 37 bp, Artificial Sequence
  Description of Artificial Sequence: Synthetic oligonucleotide
attgctccttacgaggagactctctccattcttcagt

SEQ ID NO: 1599 - DNA, 37 bp, Artificial Sequence
  Description of Artificial Sequence: Synthetic oligonucleotide
attgctccttacgaggagacctgaagaatggagagag

SEQ ID NO: 1600 - DNA, 37 bp, Artificial Sequence
  Description of Artificial Sequence: Synthetic oligonucleotide
attgctccttacgaggagacaattctctctccattct

SEQ ID NO: 1601 - DNA, 37 bp, Artificial Sequence
  Description of Artificial Sequence: Synthetic oligonucleotide
attgctccttacgaggagaccaattctctctccattc

SEQ ID NO: 1602 - DNA, 37 bp, Artificial Sequence
  Description of Artificial Sequence: Synthetic oligonucleotide
attgctccttacgaggagactcaattctctctccatt

SEQ ID NO: 1603 - DNA, 37 bp, Artificial Sequence
  Description of Artificial Sequence: Synthetic oligonucleotide
attgctccttacgaggagacttcaattctctctccat

SEQ ID NO: 1604 - DNA, 37 bp, Artificial Sequence
  Description of Artificial Sequence: Synthetic oligonucleotide
attgctccttacgaggagacaaaaagtggagcattca

SEQ ID NO: 1605 - DNA, 37 bp, Artificial Sequence
  Description of Artificial Sequence: Synthetic oligonucleotide
attgctccttacgaggagacctgaaagacaagtctga

SEQ ID NO: 1606 - DNA, 37 bp, Artificial Sequence
  Description of Artificial Sequence: Synthetic oligonucleotide
attgctccttacgaggagacagacttgtctttcagca

SEQ ID NO: 1607 - DNA, 37 bp, Artificial Sequence
  Description of Artificial Sequence: Synthetic oligonucleotide
attgctccttacgaggagactctttcagcaaggactg

SEQ ID NO: 1608 - DNA, 37 bp, Artificial Sequence
  Description of Artificial Sequence: Synthetic oligonucleotide
attgctccttacgaggagaccagcaaggactggtctt

SEQ ID NO: 1609 - DNA, 37 bp, Artificial Sequence
  Description of Artificial Sequence: Synthetic oligonucleotide
attgctccttacgaggagacagcaaggactggtcttt

SEQ ID NO: 1610 - DNA, 37 bp, Artificial Sequence
  Description of Artificial Sequence: Synthetic oligonucleotide
attgctccttacgaggagacctatctcttgtactaca

SEQ ID NO: 1611 - DNA, 37 bp, Artificial Sequence
  Description of Artificial Sequence: Synthetic oligonucleotide
attgctccttacgaggagactatctcttgtactacac

SEQ ID NO: 1612 - DNA, 37 bp, Artificial Sequence
  Description of Artificial Sequence: Synthetic oligonucleotide
attgctccttacgaggagacagtgtagtacaagagat

SEQ ID NO: 1613 - DNA, 37 bp, Artificial Sequence
  Description of Artificial Sequence: Synthetic oligonucleotide
attgctccttacgaggagactactacactgaattcac

SEQ ID NO: 1614 - DNA, 37 bp, Artificial Sequence
  Description of Artificial Sequence: Synthetic oligonucleotide
attgctccttacgaggagacagtgggggtgaattcag

SEQ ID NO: 1615 - DNA, 37 bp, Artificial Sequence
  Description of Artificial Sequence: Synthetic oligonucleotide
attgctccttacgaggagaccagtgggggtgaattca

SEQ ID NO: 1616 - DNA, 37 bp, Artificial Sequence
  Description of Artificial Sequence: Synthetic oligonucleotide
attgctccttacgaggagactcagtgggggtgaattc

SEQ ID NO: 1617 - DNA, 37 bp, Artificial Sequence
  Description of Artificial Sequence: Synthetic oligonucleotide
attgctccttacgaggagacttcagtgggggtgaatt

SEQ ID NO: 1618 - DNA, 37 bp, Artificial Sequence
  Description of Artificial Sequence: Synthetic oligonucleotide
attgctccttacgaggagacacccccactgaaaaaga

SEQ ID NO: 1619 - DNA, 37 bp, Artificial Sequence
  Description of Artificial Sequence: Synthetic oligonucleotide
attgctccttacgaggagacacacggcaggcatactc

SEQ ID NO: 1620 - DNA, 37 bp, Artificial Sequence
  Description of Artificial Sequence: Synthetic oligonucleotide
attgctccttacgaggagacggctgtgacaaagtcac

SEQ ID NO: 1621 - DNA, 37 bp, Artificial Sequence
  Description of Artificial Sequence: Synthetic oligonucleotide
attgctccttacgaggagacgtcacagcccaagatag

SEQ ID NO: 1622 - DNA, 37 bp, Artificial Sequence
  Description of Artificial Sequence: Synthetic oligonucleotide
attgctccttacgaggagactcacagcccaagatagt

SEQ ID NO: 1623 - DNA, 37 bp, Artificial Sequence
  Description of Artificial Sequence: Synthetic oligonucleotide
attgctccttacgaggagacactatcttgggctgtga

SEQ ID NO: 1624 - DNA, 37 bp, Artificial Sequence
  Description of Artificial Sequence: Synthetic oligonucleotide
attgctccttacgaggagacccccacttaactatctt

SEQ ID NO: 1625 - RNA, 37 nt, Artificial Sequence
  Description of Artificial Sequence: Synthetic oligonucleotide
auugcuccuuacgaggagacccuuccgcucaccuccg

SEQ ID NO: 1626 - RNA, 37 nt, Artificial Sequence; identical to SEQ ID NO: 1625
  Description of Artificial Sequence: Synthetic oligonucleotide

SEQ ID NO: 1627 - RNA, 37 nt, Artificial Sequence
  Description of Artificial Sequence: Synthetic oligonucleotide
auugcuccuuacgaggagaccgcucaccuccgccuga

SEQ ID NO: 1628 - RNA, 37 nt, Artificial Sequence
  Description of Artificial Sequence: Synthetic oligonucleotide
auugcuccuuacgaggagacuccacugcucaggcgga

SEQ ID NO: 1629 - RNA, 37 nt, Artificial Sequence
  Description of Artificial Sequence: Synthetic oligonucleotide
auugcuccuuacgaggagacuagcaccgcccagacga

SEQ ID NO: 1630 - RNA, 37 nt, Artificial Sequence
  Description of Artificial Sequence: Synthetic oligonucleotide
auugcuccuuacgaggagacaggcaugcagaucccac

SEQ ID NO: 1631 - RNA, 37 nt, Artificial Sequence
  Description of Artificial Sequence: Synthetic oligonucleotide
auugcuccuuacgaggagaccacaggcgcccuggcca

SEQ ID NO: 1632 - RNA, 37 nt, Artificial Sequence
  Description of Artificial Sequence: Synthetic oligonucleotide
auugcuccuuacgaggagacucugggcggugcuacaa

SEQ ID NO: 1633 - RNA, 37 nt, Artificial Sequence
  Description of Artificial Sequence: Synthetic oligonucleotide
auugcuccuuacgaggagacgcaugccuggagcagcc

SEQ ID NO: 1634 - RNA, 37 nt, Artificial Sequence; identical to SEQ ID NO: 1629
  Description of Artificial Sequence: Synthetic oligonucleotide

SEQ ID NO: 1635 - RNA, 37 nt, Artificial Sequence
  Description of Artificial Sequence: Synthetic oligonucleotide
auugcuccuuacgaggagacuggccgccagcccaguu

SEQ ID NO: 1636 - RNA, 37 nt, Artificial Sequence
  Description of Artificial Sequence: Synthetic oligonucleotide
auugcuccuuacgaggagaccuuccgcucaccuccgc

SEQ ID NO: 1637 - RNA, 37 nt, Artificial Sequence
  Description of Artificial Sequence: Synthetic oligonucleotide
auugcuccuuacgaggagaccagggccugucugggga

SEQ ID NO: 1638 - RNA, 37 nt, Artificial Sequence
  Description of Artificial Sequence: Synthetic oligonucleotide
auugcuccuuacgaggagacuccccagcccugcucgu

SEQ ID NO: 1639 - RNA, 37 nt, Artificial Sequence
  Description of Artificial Sequence: Synthetic oligonucleotide
auugcuccuuacgaggagacggucaccacgagcaggg

SEQ ID NO: 1640 - RNA, 37 nt, Artificial Sequence
  Description of Artificial Sequence: Synthetic oligonucleotide
auugcuccuuacgaggagacuccccuucggucaccac

SEQ ID NO: 1641 - RNA, 37 nt, Artificial Sequence
  Description of Artificial Sequence: Synthetic oligonucleotide
auugcuccuuacgaggagacgagaagcugcaggugaa

SEQ ID NO: 1642 - RNA, 37 nt, Artificial Sequence
  Description of Artificial Sequence: Synthetic oligonucleotide
auugcuccuuacgaggagacaccugcagcuucuccaa

SEQ ID NO: 1643 - RNA, 37 nt, Artificial Sequence
  Description of Artificial Sequence: Synthetic oligonucleotide
auugcuccuuacgaggagacuccaacacaucggagag

SEQ ID NO: 1644 - RNA, 37 nt, Artificial Sequence
  Description of Artificial Sequence: Synthetic oligonucleotide
auugcuccuuacgaggagacgcacgaagcucuccgau

SEQ ID NO: 1645 - RNA, 37 nt, Artificial Sequence
  Description of Artificial Sequence: Synthetic oligonucleotide
auugcuccuuacgaggagacagcacgaagcucuccga

SEQ ID NO: 1646 - RNA, 37 nt, Artificial Sequence
  Description of Artificial Sequence: Synthetic oligonucleotide
auugcuccuuacgaggagacgugcuaaacugguaccg

SEQ ID NO: 1647 - RNA, 37 nt, Artificial Sequence
  Description of Artificial Sequence: Synthetic oligonucleotide
auugcuccuuacgaggagaccuggggcucaugcggua

SEQ ID NO: 1648 - RNA, 37 nt, Artificial Sequence
  Description of Artificial Sequence: Synthetic oligonucleotide
auugcuccuuacgaggagacuccgucugguugcuggg

SEQ ID NO: 1649 - RNA, 37 nt, Artificial Sequence
  Description of Artificial Sequence: Synthetic oligonucleotide
auugcuccuuacgaggagaccccgaggaccgcagcca

SEQ ID NO: 1650 - RNA, 37 nt, Artificial Sequence
  Description of Artificial Sequence: Synthetic oligonucleotide
auugcuccuuacgaggagacugugacacggaagcggc

SEQ ID NO: 1651 - RNA, 37 nt, Artificial Sequence
  Description of Artificial Sequence: Synthetic oligonucleotide
auugcuccuuacgaggagaccgugucacacaacugcc

SEQ ID NO: 1652 - RNA, 37 nt, Artificial Sequence
  Description of Artificial Sequence: Synthetic oligonucleotide
auugcuccuuacgaggagacggcaguugugugacacg

SEQ ID NO: 1653 - RNA, 37 nt, Artificial Sequence
  Description of Artificial Sequence: Synthetic oligonucleotide
auugcuccuuacgaggagaccacaugagcguggucag

SEQ ID NO: 1654 - RNA, 37 nt, Artificial Sequence
  Description of Artificial Sequence: Synthetic oligonucleotide
auugcuccuuacgaggagaccgccgggcccugaccac

SEQ ID NO: 1655 - RNA, 37 nt, Artificial Sequence
  Description of Artificial Sequence: Synthetic oligonucleotide
auugcuccuuacgaggagacggggccagggagauggc

SEQ ID NO: 1656 - RNA, 37 nt, Artificial Sequence
  Description of Artificial Sequence: Synthetic oligonucleotide
auugcuccuuacgaggagacaucugcgccuugggggc

SEQ ID NO: 1657 - RNA, 37 nt, Artificial Sequence
  Description of Artificial Sequence: Synthetic oligonucleotide
auugcuccuuacgaggagacgaucugcgccuuggggg

SEQ ID NO: 1658 - RNA, 37 nt, Artificial Sequence
  Description of Artificial Sequence: Synthetic oligonucleotide
auugcuccuuacgaggagacccagacaggcccuggaa

SEQ ID NO: 1659 - RNA, 37 nt, Artificial Sequence
  Description of Artificial Sequence: Synthetic oligonucleotide
auugcuccuuacgaggagacccagcccugcucguggu

SEQ ID NO: 1660 - RNA, 37 nt, Artificial Sequence
  Description of Artificial Sequence: Synthetic oligonucleotide
auugcuccuuacgaggagacucucuggaagggcacaa

SEQ ID NO: 1661 - RNA, 37 nt, Artificial Sequence
  Description of Artificial Sequence: Synthetic oligonucleotide
auugcuccuuacgaggagacgugcccuuccagagaga

SEQ ID NO: 1662 - RNA, 37 nt, Artificial Sequence
  Description of Artificial Sequence: Synthetic oligonucleotide
auugcuccuuacgaggagacugcccuuccagagagaa

SEQ ID NO: 1663 - RNA, 37 nt, Artificial Sequence
  Description of Artificial Sequence: Synthetic oligonucleotide
auugcuccuuacgaggagacugcccuucucucuggaa

SEQ ID NO: 1664 - RNA, 37 nt, Artificial Sequence
  Description of Artificial Sequence: Synthetic oligonucleotide
auugcuccuuacgaggagaccagagagaagggcagaa

SEQ ID NO: 1665 - RNA, 37 nt, Artificial Sequence
  Description of Artificial Sequence: Synthetic oligonucleotide
auugcuccuuacgaggagacgaacuggccggcuggcc

SEQ ID NO: 1666 - RNA, 37 nt, Artificial Sequence
  Description of Artificial Sequence: Synthetic oligonucleotide
auugcuccuuacgaggagacggaacuggccggcuggc

SEQ ID NO: 1667 - RNA, 37 nt, Artificial Sequence
  Description of Artificial Sequence: Synthetic oligonucleotide
auugcuccuuacgaggagaccaaacccuggugguugg

SEQ ID NO: 1668 - RNA, 37 nt, Artificial Sequence
  Description of Artificial Sequence: Synthetic oligonucleotide
auugcuccuuacgaggagacgugucgugggcggccug

SEQ ID NO: 1669 - RNA, 37 nt, Artificial Sequence
  Description of Artificial Sequence: Synthetic oligonucleotide
auugcuccuuacgaggagacccucgugcggcccggga

SEQ ID NO: 1670 - RNA, 37 nt, Artificial Sequence
  Description of Artificial Sequence: Synthetic oligonucleotide
auugcuccuuacgaggagacucccugcagagaaacac

SEQ ID NO: 1671 - RNA, 37 nt, Artificial Sequence
  Description of Artificial Sequence: Synthetic oligonucleotide
auugcuccuuacgaggagaccucugcagggacaauag

SEQ ID NO: 1672 - RNA, 37 nt, Artificial Sequence
  Description of Artificial Sequence: Synthetic oligonucleotide
auugcuccuuacgaggagacucugcagggacaauagg

SEQ ID NO: 1673 - RNA, 37 nt, Artificial Sequence
  Description of Artificial Sequence: Synthetic oligonucleotide
auugcuccuuacgaggagaccuccucaaagaaggagg

SEQ ID NO: 1674 - RNA, 37 nt, Artificial Sequence
  Description of Artificial Sequence: Synthetic oligonucleotide
auugcuccuuacgaggagacuccucaaagaaggagga

SEQ ID NO: 1675 - RNA, 37 nt, Artificial Sequence
  Description of Artificial Sequence: Synthetic oligonucleotide
auugcuccuuacgaggagacucuguggacuaugggga

SEQ ID NO: 1676 - RNA, 37 nt, Artificial Sequence
  Description of Artificial Sequence: Synthetic oligonucleotide
auugcuccuuacgaggagacucucgccacuggaaauc

SEQ ID NO: 1677 - RNA, 37 nt, Artificial Sequence
  Description of Artificial Sequence: Synthetic oligonucleotide
auugcuccuuacgaggagacccaguggcgagagaaga

SEQ ID NO: 1678 - RNA, 37 nt, Artificial Sequence
  Description of Artificial Sequence: Synthetic oligonucleotide
auugcuccuuacgaggagaccaguggcgagagaagac

SEQ ID NO: 1679 - RNA, 37 nt, Artificial Sequence
  Description of Artificial Sequence: Synthetic oligonucleotide
auugcuccuuacgaggagaccgcuaggaaagacaaug

SEQ ID NO: 1680 - RNA, 37 nt, Artificial Sequence
  Description of Artificial Sequence: Synthetic oligonucleotide
auugcuccuuacgaggagacucuuuccuagcggaaug

SEQ ID NO: 1681 - RNA, 37 nt, Artificial Sequence
  Description of Artificial Sequence: Synthetic oligonucleotide
auugcuccuuacgaggagacccuagcggaaugggcac

SEQ ID NO: 1682 - RNA, 37 nt, Artificial Sequence
  Description of Artificial Sequence: Synthetic oligonucleotide
auugcuccuuacgaggagaccuagcggaaugggcacc

SEQ ID NO: 1683 - RNA, 37 nt, Artificial Sequence
  Description of Artificial Sequence: Synthetic oligonucleotide
auugcuccuuacgaggagacgccccucugaccggcuu

SEQ ID NO: 1684 - RNA, 37 nt, Artificial Sequence
  Description of Artificial Sequence: Synthetic oligonucleotide
auugcuccuuacgaggagaccuuggccaccaguguuc

SEQ ID NO: 1685 - RNA, 37 nt, Artificial Sequence
  Description of Artificial Sequence: Synthetic oligonucleotide
auugcuccuuacgaggagacgccaccaguguucugca

SEQ ID NO: 1686 - RNA, 37 nt, Artificial Sequence
  Description of Artificial Sequence: Synthetic oligonucleotide
auugcuccuuacgaggagacugcagacccuccaccau

SEQ ID NO: 1687 - RNA, 37 nt, Artificial Sequence
  Description of Artificial Sequence: Synthetic oligonucleotide
auugcuccuuacgaggagacuccugaggaaaugcgcu

SEQ ID NO: 1688 - RNA, 37 nt, Artificial Sequence
  Description of Artificial Sequence: Synthetic oligonucleotide
auugcuccuuacgaggagacccucaggagaagcaggc

SEQ ID NO: 1689 - RNA, 37 nt, Artificial Sequence
  Description of Artificial Sequence: Synthetic oligonucleotide
auugcuccuuacgaggagaccucaggagaagcaggca

SEQ ID NO: 1690 - RNA, 37 nt, Artificial Sequence
  Description of Artificial Sequence: Synthetic oligonucleotide
auugcuccuuacgaggagaccaggccguccaggggcu

SEQ ID NO: 1691 - RNA, 37 nt, Artificial Sequence
  Description of Artificial Sequence: Synthetic oligonucleotide
auugcuccuuacgaggagacagacaugaguccugugg

SEQ ID NO: 1692 - RNA, 37 nt, Artificial Sequence
  Description of Artificial Sequence: Synthetic oligonucleotide
auugcuccuuacgaggagacagguccugccagcacag

SEQ ID NO: 1693 - RNA, 37 nt, Artificial Sequence
  Description of Artificial Sequence: Synthetic oligonucleotide
auugcuccuuacgaggagacagggagcuggacgcagg

SEQ ID NO: 1694 - RNA, 37 nt, Artificial Sequence
  Description of Artificial Sequence: Synthetic oligonucleotide
auugcuccuuacgaggagacagccccgggccgcaggc

SEQ ID NO: 1695 - RNA, 37 nt, Artificial Sequence
  Description of Artificial Sequence: Synthetic oligonucleotide
auugcuccuuacgaggagacaggcaggaggcuccggg

SEQ ID NO: 1696 - RNA, 37 nt, Artificial Sequence
  Description of Artificial Sequence: Synthetic oligonucleotide
auugcuccuuacgaggagacggggcugguuggagaug

SEQ ID NO: 1697 - RNA, 37 nt, Artificial Sequence
  Description of Artificial Sequence: Synthetic oligonucleotide
auugcuccuuacgaggagacgagauggccuuggagca

SEQ ID NO: 1698 - RNA, 37 nt, Artificial Sequence
  Description of Artificial Sequence: Synthetic oligonucleotide
auugcuccuuacgaggagacgcugcuccaaggccauc

SEQ ID NO: 1699 - RNA, 37 nt, Artificial Sequence
  Description of Artificial Sequence: Synthetic oligonucleotide
auugcuccuuacgaggagacgagcagccaaggugccc

SEQ ID NO: 1700 - RNA, 37 nt, Artificial Sequence
  Description of Artificial Sequence: Synthetic oligonucleotide
auugcuccuuacgaggagacgggaugccacugccagg

SEQ ID NO: 1701 - RNA, 37 nt, Artificial Sequence
  Description of Artificial Sequence: Synthetic oligonucleotide
auugcuccuuacgaggagaccgggaugccacugccag

SEQ ID NO: 1702 - RNA, 37 nt, Artificial Sequence
  Description of Artificial Sequence: Synthetic oligonucleotide
auugcuccuuacgaggagacggcccugcguccagggc

SEQ ID NO: 1703 - RNA, 37 nt, Artificial Sequence
  Description of Artificial Sequence: Synthetic oligonucleotide
auugcuccuuacgaggagacucugcucccugcaggcc

SEQ ID NO: 1704 - RNA, 37 nt, Artificial Sequence
  Description of Artificial Sequence: Synthetic oligonucleotide
auugcuccuuacgaggagacucuaggccugcagggag

SEQ ID NO: 1705 - RNA, 37 nt, Artificial Sequence
  Description of Artificial Sequence: Synthetic oligonucleotide
auugcuccuuacgaggagacccugaaacuucucuagg

SEQ ID NO: 1706 - RNA, 37 nt, Artificial Sequence
  Description of Artificial Sequence: Synthetic oligonucleotide
auugcuccuuacgaggagacugaccuucccugaaacu

SEQ ID NO: 1707 - RNA, 37 nt, Artificial Sequence
  Description of Artificial Sequence: Synthetic oligonucleotide
auugcuccuuacgaggagaccagggaaggucagaaga

SEQ ID NO: 1708 - RNA, 37 nt, Artificial Sequence
  Description of Artificial Sequence: Synthetic oligonucleotide
auugcuccuuacgaggagacagggaaggucagaagag

SEQ ID NO: 1709 - RNA, 37 nt, Artificial Sequence
  Description of Artificial Sequence: Synthetic oligonucleotide
auugcuccuuacgaggagaccugcccugcccaccaca

SEQ ID NO: 1710 - RNA, 37 nt, Artificial Sequence
  Description of Artificial Sequence: Synthetic oligonucleotide
auugcuccuuacgaggagacccugcccugcccaccac

SEQ ID NO: 1711 - RNA, 37 nt, Artificial Sequence
  Description of Artificial Sequence: Synthetic oligonucleotide
auugcuccuuacgaggagacacacaugcccaggcagc

SEQ ID NO: 1712 - RNA, 37 nt, Artificial Sequence
  Description of Artificial Sequence: Synthetic oligonucleotide
auugcuccuuacgaggagaccacaugcccaggcagca

SEQ ID NO: 1713 - RNA, 37 nt, Artificial Sequence
  Description of Artificial Sequence: Synthetic oligonucleotide
auugcuccuuacgaggagacccugccccacaaagggc

SEQ ID NO: 1714 - RNA, 37 nt, Artificial Sequence
  Description of Artificial Sequence: Synthetic oligonucleotide
auugcuccuuacgaggagacguggggcagggaagcug

SEQ ID NO: 1715 - RNA, 37 nt, Artificial Sequence
  Description of Artificial Sequence: Synthetic oligonucleotide
auugcuccuuacgaggagacuggggcagggaagcuga

SEQ ID NO: 1716 - RNA, 37 nt, Artificial Sequence
  Description of Artificial Sequence: Synthetic oligonucleotide
auugcuccuuacgaggagaccugccucagcuucccug

SEQ ID NO: 1717 - RNA, 37 nt, Artificial Sequence
  Description of Artificial Sequence: Synthetic oligonucleotide
auugcuccuuacgaggagaccaggcccagccagcacu

SEQ ID NO: 1718 - RNA, 37 nt, Artificial Sequence
  Description of Artificial Sequence: Synthetic oligonucleotide
auugcuccuuacgaggagacaggcccagccagcacuc

SEQ ID NO: 1719 - RNA, 37 nt, Artificial Sequence
  Description of Artificial Sequence: Synthetic oligonucleotide
auugcuccuuacgaggagaccaccccagccccucaca

SEQ ID NO: 1720 - RNA, 37 nt, Artificial Sequence
  Description of Artificial Sequence: Synthetic oligonucleotide
auugcuccuuacgaggagacggaccguaggauguccc

SEQ ID NO: 1721 - RNA, 37 nt, Artificial Sequence
  Description of Artificial Sequence: Synthetic oligonucleotide
auugcuccuuacgaggagaccuacacaaugcguugcc

SEQ ID NO: 1722 - RNA, 37 nt, Artificial Sequence
  Description of Artificial Sequence: Synthetic oligonucleotide
auugcuccuuacgaggagacgggcucugacagguagg

SEQ ID NO: 1723 - RNA, 37 nt, Artificial Sequence
  Description of Artificial Sequence: Synthetic oligonucleotide
auugcuccuuacgaggagacuguaggaaucccagcca

SEQ ID NO: 1724 - RNA, 37 nt, Artificial Sequence
  Description of Artificial Sequence: Synthetic oligonucleotide
auugcuccuuacgaggagacccuggcuccacgcccug

SEQ ID NO: 1725 - RNA, 37 nt, Artificial Sequence
  Description of Artificial Sequence: Synthetic oligonucleotide
auugcuccuuacgaggagacgggaagcugagggcacg

SEQ ID NO: 1726 - RNA, 37 nt, Artificial Sequence
  Description of Artificial Sequence: Synthetic oligonucleotide
auugcuccuuacgaggagacacagcgaugcugacccc

SEQ ID NO: 1727 - RNA, 37 nt, Artificial Sequence
  Description of Artificial Sequence: Synthetic oligonucleotide
auugcuccuuacgaggagacuuaacagcgaugcugac

SEQ ID NO: 1728 - RNA, 37 nt, Artificial Sequence
  Description of Artificial Sequence: Synthetic oligonucleotide
auugcuccuuacgaggagacuaugaccagauggaccu

SEQ ID NO: 1729 - RNA, 37 nt, Artificial Sequence
  Description of Artificial Sequence: Synthetic oligonucleotide
auugcuccuuacgaggagacgggccccuagaaggugg

SEQ ID NO: 1730 - RNA, 37 nt, Artificial Sequence
  Description of Artificial Sequence: Synthetic oligonucleotide
auugcuccuuacgaggagacuaggggccccaacucca

SEQ ID NO: 1731 - RNA, 37 nt, Artificial Sequence
  Description of Artificial Sequence: Synthetic oligonucleotide
auugcuccuuacgaggagacagaagcuccagguagcc

SEQ ID NO: 1732 - RNA, 37 nt, Artificial Sequence
  Description of Artificial Sequence: Synthetic oligonucleotide
auugcuccuuacgaggagacuccagccagguccaucu

SEQ ID NO: 1733 - RNA, 37 nt, Artificial Sequence
  Description of Artificial Sequence: Synthetic oligonucleotide
auugcuccuuacgaggagacuucuccagccaggucca

SEQ ID NO: 1734 - RNA, 37 nt, Artificial Sequence
  Description of Artificial Sequence: Synthetic oligonucleotide
auugcuccuuacgaggagacccgcuguugccgccgcu

SEQ ID NO: 1735 - RNA, 37 nt, Artificial Sequence
  Description of Artificial Sequence: Synthetic oligonucleotide
auugcuccuuacgaggagacccgccgcugcugcugcu

SEQ ID NO: 1736 - RNA, 37 nt, Artificial Sequence
  Description of Artificial Sequence: Synthetic oligonucleotide
auugcuccuuacgaggagaccugcuacugugccccac

SEQ ID NO: 1737 - RNA, 37 nt, Artificial Sequence
  Description of Artificial Sequence: Synthetic oligonucleotide
auugcuccuuacgaggagacauaaucuccauccucgu

SEQ ID NO: 1738 - RNA, 37 nt, Artificial Sequence
  Description of Artificial Sequence: Synthetic oligonucleotide
auugcuccuuacgaggagacugaagagcugaugcucg

SEQ ID NO: 1739 - RNA, 37 nt, Artificial Sequence
  Description of Artificial Sequence: Synthetic oligonucleotide
auugcuccuuacgaggagacgagcaacggcggaaggu

SEQ ID NO: 1740 - RNA, 37 nt, Artificial Sequence
  Description of Artificial Sequence: Synthetic oligonucleotide
auugcuccuuacgaggagaccuggcagccuccaggcc

SEQ ID NO: 1741 - RNA, 37 nt, Artificial Sequence
  Description of Artificial Sequence: Synthetic oligonucleotide
auugcuccuuacgaggagacuggugcugauggaggag

SEQ ID NO: 1742 - RNA, 37 nt, Artificial Sequence
  Description of Artificial Sequence: Synthetic oligonucleotide
auugcuccuuacgaggagacaaucuguagccucuggg

SEQ ID NO: 1743 - RNA, 37 nt, Artificial Sequence
  Description of Artificial Sequence: Synthetic oligonucleotide
auugcuccuuacgaggagacuucaaucuguagccucu

SEQ ID NO: 1744 - RNA, 37 nt, Artificial Sequence
  Description of Artificial Sequence: Synthetic oligonucleotide
auugcuccuuacgaggagacguucaaucuguagccuc

SEQ ID NO: 1745 - RNA, 37 nt, Artificial Sequence
  Description of Artificial Sequence: Synthetic oligonucleotide
auugcuccuuacgaggagacaacaaacugcccaccgc

SEQ ID NO: 1746 - RNA, 37 nt, Artificial Sequence
  Description of Artificial Sequence: Synthetic oligonucleotide
auugcuccuuacgaggagacaugacauagccccggcg

SEQ ID NO: 1747 - RNA, 37 nt, Artificial Sequence
  Description of Artificial Sequence: Synthetic oligonucleotide
auugcuccuuacgaggagacuacauaucuuuuaugac

SEQ ID NO: 1748 - RNA, 37 nt, Artificial Sequence
  Description of Artificial Sequence: Synthetic oligonucleotide
auugcuccuuacgaggagacuaugaccucuucccugg

SEQ ID NO: 1749 - RNA, 37 nt, Artificial Sequence
  Description of Artificial Sequence: Synthetic oligonucleotide
auugcuccuuacgaggagacaugaccucuucccuggc

SEQ ID NO: 1750 - RNA, 37 nt, Artificial Sequence
  Description of Artificial Sequence: Synthetic oligonucleotide
auugcuccuuacgaggagacugaccucuucccuggcu

SEQ ID NO: 1751 - RNA, 37 nt, Artificial Sequence
  Description of Artificial Sequence: Synthetic oligonucleotide
auugcuccuuacgaggagacaccaagaagccagggaa

SEQ ID NO: 1752 - RNA, 37 nt, Artificial Sequence
  Description of Artificial Sequence: Synthetic oligonucleotide
auugcuccuuacgaggagacccuggcuucuuggugaa

SEQ ID NO: 1753 - RNA, 37 nt, Artificial Sequence
  Description of Artificial Sequence: Synthetic oligonucleotide
auugcuccuuacgaggagacuuggugaagaugagcag

SEQ ID NO: 1754 - RNA, 37 nt, Artificial Sequence
  Description of Artificial Sequence: Synthetic oligonucleotide
auugcuccuuacgaggagacgugaagaugagcaguga

SEQ ID NO: 1755 - RNA, 37 nt, Artificial Sequence
  Description of Artificial Sequence: Synthetic oligonucleotide
auugcuccuuacgaggagacccccauguggaguacau

SEQ ID NO: 1756 - RNA, 37 nt, Artificial Sequence
  Description of Artificial Sequence: Synthetic oligonucleotide
auugcuccuuacgaggagaccucaauguacuccacau

SEQ ID NO: 1757 - RNA, 37 nt, Artificial Sequence
  Description of Artificial Sequence: Synthetic oligonucleotide
auugcuccuuacgaggagacaggaagacuccuuuguc

SEQ ID NO: 1758 - RNA, 37 nt, Artificial Sequence
  Description of Artificial Sequence: Synthetic oligonucleotide
auugcuccuuacgaggagacgucuucgcccagagcau

SEQ ID NO: 1759 - RNA, 37 nt, Artificial Sequence
  Description of Artificial Sequence: Synthetic oligonucleotide
auugcuccuuacgaggagacucuucgcccagagcauc

SEQ ID NO: 1760 - RNA, 37 nt, Artificial Sequence
  Description of Artificial Sequence: Synthetic oligonucleotide
auugcuccuuacgaggagacgcccagagcaucccaug

SEQ ID NO: 1761 - RNA, 37 nt, Artificial Sequence
  Description of Artificial Sequence: Synthetic oligonucleotide
auugcuccuuacgaggagaccaugggaugcucugggc

SEQ ID NO: 1762 - RNA, 37 nt, Artificial Sequence
  Description of Artificial Sequence: Synthetic oligonucleotide
auugcuccuuacgaggagacgcuccagguuccauggg

SEQ ID NO: 1763 - RNA, 37 nt, Artificial Sequence
  Description of Artificial Sequence: Synthetic oligonucleotide
auugcuccuuacgaggagacucccagcauggcaccag

SEQ ID NO: 1764 - RNA, 37 nt, Artificial Sequence
  Description of Artificial Sequence: Synthetic oligonucleotide
auugcuccuuacgaggagaccucugucuggugccaug

SEQ ID NO: 1765 - RNA, 37 nt, Artificial Sequence
  Description of Artificial Sequence: Synthetic oligonucleotide
auugcuccuuacgaggagacgauaccagcauccaggg

SEQ ID NO: 1766 - RNA, 37 nt, Artificial Sequence
  Description of Artificial Sequence: Synthetic oligonucleotide
auugcuccuuacgaggagacagggcagggucaccauc

SEQ ID NO: 1767 - RNA, 37 nt, Artificial Sequence
  Description of Artificial Sequence: Synthetic oligonucleotide
auugcuccuuacgaggagacaagucggugauggugac

SEQ ID NO: 1768 - RNA, 37 nt, Artificial Sequence
  Description of Artificial Sequence: Synthetic oligonucleotide
auugcuccuuacgaggagacaacagcgugccggagga

SEQ ID NO: 1769 - RNA, 37 nt, Artificial Sequence
  Description of Artificial Sequence: Synthetic oligonucleotide
auugcuccuuacgaggagacgccacaccagcaucccg

SEQ ID NO: 1770 - RNA, 37 nt, Artificial Sequence
  Description of Artificial Sequence: Synthetic oligonucleotide
auugcuccuuacgaggagacagcacacgcaggcugug

SEQ ID NO: 1771 - RNA, 37 nt, Artificial Sequence
  Description of Artificial Sequence: Synthetic oligonucleotide
auugcuccuuacgaggagacacaguugagcacacgca

SEQ ID NO: 1772 - RNA, 37 nt, Artificial Sequence
  Description of Artificial Sequence: Synthetic oligonucleotide
auugcuccuuacgaggagacccuugacaguugagcac

SEQ ID NO: 1773 - RNA, 37 nt, Artificial Sequence
  Description of Artificial Sequence: Synthetic oligonucleotide
auugcuccuuacgaggagacgcugacucuuccgaaua

SEQ ID NO: 1774 - RNA, 37 nt, Artificial Sequence
  Description of Artificial Sequence: Synthetic oligonucleotide
auugcuccuuacgaggagacauucggaagagucagcu

SEQ ID NO: 1775 - RNA, 37 nt, Artificial Sequence
  Description of Artificial Sequence: Synthetic oligonucleotide
auugcuccuuacgaggagacuucggaagagucagcua

SEQ ID NO: 1776 - RNA, 37 nt, Artificial Sequence
  Description of Artificial Sequence: Synthetic oligonucleotide
auugcuccuuacgaggagacggaagagucagcuaauc

SEQ ID NO: 1777 - RNA, 37 nt, Artificial Sequence
  Description of Artificial Sequence: Synthetic oligonucleotide
auugcuccuuacgaggagacugcugccccuggccggu

SEQ ID NO: 1778 - RNA, 37 nt, Artificial Sequence
  Description of Artificial Sequence: Synthetic oligonucleotide
auugcuccuuacgaggagacaggaugcggcuauaccc

SEQ ID NO: 1779 - RNA, 37 nt, Artificial Sequence
  Description of Artificial Sequence: Synthetic oligonucleotide
auugcuccuuacgaggagacccagcugcugcaaccag

SEQ ID NO: 1780 - RNA, 37 nt, Artificial Sequence
  Description of Artificial Sequence: Synthetic oligonucleotide
auugcuccuuacgaggagaccagcagcugggaacuuc

SEQ ID NO: 1781 - RNA, 37 nt, Artificial Sequence
  Description of Artificial Sequence: Synthetic oligonucleotide
auugcuccuuacgaggagaccgggacgacgccugccu

SEQ ID NO: 1782 - RNA, 37 nt, Artificial Sequence
  Description of Artificial Sequence: Synthetic oligonucleotide
auugcuccuuacgaggagacguggccccgacugugau

SEQ ID NO: 1783 - RNA, 37 nt, Artificial Sequence
  Description of Artificial Sequence: Synthetic oligonucleotide
auugcuccuuacgaggagacccuuggggacuuugggg

SEQ ID NO: 1784 - RNA, 37 nt, Artificial Sequence
  Description of Artificial Sequence: Synthetic oligonucleotide
auugcuccuuacgaggagacguccccaaaguccccaa

SEQ ID NO: 1785 - RNA, 37 nt, Artificial Sequence
  Description of Artificial Sequence: Synthetic oligonucleotide
auugcuccuuacgaggagacgggacuuuggggacuaa

SEQ ID NO: 1786 - RNA, 37 nt, Artificial Sequence
  Description of Artificial Sequence: Synthetic oligonucleotide
auugcuccuuacgaggagacggggacuaauuuuggac

SEQ ID NO: 1787 - RNA, 37 nt, Artificial Sequence
  Description of Artificial Sequence: Synthetic oligonucleotide
auugcuccuuacgaggagacgggacuaauuuuggacg

SEQ ID NO: 1788 - RNA, 37 nt, Artificial Sequence
  Description of Artificial Sequence: Synthetic oligonucleotide
auugcuccuuacgaggagacuggacgcuguguggauc

SEQ ID NO: 1789 - RNA, 37 nt, Artificial Sequence
  Description of Artificial Sequence: Synthetic oligonucleotide
auugcuccuuacgaggagacggacgcuguguggaucu

SEQ ID NO: 1790 - RNA, 37 nt, Artificial Sequence
  Description of Artificial Sequence: Synthetic oligonucleotide
auugcuccuuacgaggagacgacgcuguguggaucuc

SEQ ID NO: 1791 - RNA, 37 nt, Artificial Sequence
  Description of Artificial Sequence: Synthetic oligonucleotide
auugcuccuuacgaggagacccgggggcaaagagauc

SEQ ID NO: 1792 - RNA, 37 nt, Artificial Sequence
  Description of Artificial Sequence: Synthetic oligonucleotide
auugcuccuuacgaggagacgcccccgggaaggacau

SEQ ID NO: 1793 - RNA, 37 nt, Artificial Sequence
  Description of Artificial Sequence: Synthetic oligonucleotide
auugcuccuuacgaggagaccccccgggaaggacauc

SEQ ID NO: 1794 - RNA, 37 nt, Artificial Sequence
  Description of Artificial Sequence: Synthetic oligonucleotide
auugcuccuuacgaggagacaugucacagagugggac

SEQ ID NO: 1795 - RNA, 37 nt, Artificial Sequence
  Description of Artificial Sequence: Synthetic oligonucleotide
auugcuccuuacgaggagacuggcucggaugcugagc

SEQ ID NO: 1796 - RNA, 37 nt, Artificial Sequence
  Description of Artificial Sequence: Synthetic oligonucleotide
auugcuccuuacgaggagaccccuggccgagcugcgg

SEQ ID NO: 1797 - RNA, 37 nt, Artificial Sequence
  Description of Artificial Sequence: Synthetic oligonucleotide
auugcuccuuacgaggagacguagagaaguggaucag

SEQ ID NO: 1798 - RNA, 37 nt, Artificial Sequence
  Description of Artificial Sequence: Synthetic oligonucleotide
auugcuccuuacgaggagacgguagagaaguggauca

SEQ ID NO: 1799 - RNA, 37 nt, Artificial Sequence
  Description of Artificial Sequence: Synthetic oligonucleotide
auugcuccuuacgaggagacucuaccaaagacgucau

SEQ ID NO: 1800 - RNA, 37 nt, Artificial Sequence
  Description of Artificial Sequence: Synthetic oligonucleotide
auugcuccuuacgaggagacaugacgucuuugguaga

SEQ ID NO: 1801 - RNA, 37 nt, Artificial Sequence
  Description of Artificial Sequence: Synthetic oligonucleotide
auugcuccuuacgaggagacccugaggaccagcaggu

SEQ ID NO: 1802 - RNA, 37 nt, Artificial Sequence
  Description of Artificial Sequence: Synthetic oligonucleotide
auugcuccuuacgaggagacggggucagcaccugcug

SEQ ID NO: 1803 - RNA, 37 nt, Artificial Sequence
  Description of Artificial Sequence: Synthetic oligonucleotide
auugcuccuuacgaggagacgagugggccccgagugu

SEQ ID NO: 1804 - RNA, 37 nt, Artificial Sequence
  Description of Artificial Sequence: Synthetic oligonucleotide
auugcuccuuacgaggagacuggggcacagcgggcug

SEQ ID NO: 1805 - RNA, 37 nt, Artificial Sequence
  Description of Artificial Sequence: Synthetic oligonucleotide
auugcuccuuacgaggagacuccaggagcgggaggcg

SEQ ID NO: 1806 - RNA, 37 nt, Artificial Sequence
  Description of Artificial Sequence: Synthetic oligonucleotide
auugcuccuuacgaggagaccagaccugcuggccucc

SEQ ID NO: 1807 - RNA, 37 nt, Artificial Sequence
  Description of Artificial Sequence: Synthetic oligonucleotide
auugcuccuuacgaggagacagggccuugcagaccug

SEQ ID NO: 1808 - RNA, 37 nt, Artificial Sequence
  Description of Artificial Sequence: Synthetic oligonucleotide
auugcuccuuacgaggagacgggggugagggugucua

SEQ ID NO: 1809 - RNA, 37 nt, Artificial Sequence
  Description of Artificial Sequence: Synthetic oligonucleotide
auugcuccuuacgaggagacggggugagggugucuau

SEQ ID NO: 1810 - RNA, 37 nt, Artificial Sequence
  Description of Artificial Sequence: Synthetic oligonucleotide
auugcuccuuacgaggagacgcacggggaaccaggca

SEQ ID NO: 1811 - RNA, 37 nt, Artificial Sequence
  Description of Artificial Sequence: Synthetic oligonucleotide
auugcuccuuacgaggagaccccgugccaacugcagc

SEQ ID NO: 1812 - RNA, 37 nt, Artificial Sequence
  Description of Artificial Sequence: Synthetic oligonucleotide
auugcuccuuacgaggagacuggaugcugcaguuggc

SEQ ID NO: 1813 - RNA, 37 nt, Artificial Sequence
  Description of Artificial Sequence: Synthetic oligonucleotide
auugcuccuuacgaggagacugguggcaguggacaug

SEQ ID NO: 1814 - RNA, 37 nt, Artificial Sequence
  Description of Artificial Sequence: Synthetic oligonucleotide
auugcuccuuacgaggagaccacuucccaauggaagc

SEQ ID NO: 1815 - RNA, 37 nt, Artificial Sequence
  Description of Artificial Sequence: Synthetic oligonucleotide
auugcuccuuacgaggagaccauugggaaguggaaga

SEQ ID NO: 1816 - RNA, 37 nt, Artificial Sequence
  Description of Artificial Sequence: Synthetic oligonucleotide
auugcuccuuacgaggagacggaaguggaagaccuua

SEQ ID NO: 1817 - RNA, 37 nt, Artificial Sequence
  Description of Artificial Sequence: Synthetic oligonucleotide
auugcuccuuacgaggagacguguccggaggcagccu

SEQ ID NO: 1818 - RNA, 37 nt, Artificial Sequence
  Description of Artificial Sequence: Synthetic oligonucleotide
auugcuccuuacgaggagacgccaccaggcggccagu

SEQ ID NO: 1819 - RNA, 37 nt, Artificial Sequence
  Description of Artificial Sequence: Synthetic oligonucleotide
auugcuccuuacgaggagaccugcugccaugccccag

SEQ ID NO: 1820 - RNA, 37 nt, Artificial Sequence
  Description of Artificial Sequence: Synthetic oligonucleotide
auugcuccuuacgaggagaccagcccuggggcauggc

SEQ ID NO: 1821 - RNA, 37 nt, Artificial Sequence
  Description of Artificial Sequence: Synthetic oligonucleotide
auugcuccuuacgaggagaccauuccagcccuggggc

SEQ ID NO: 1822 - RNA, 37 nt, Artificial Sequence
  Description of Artificial Sequence: Synthetic oligonucleotide
auugcuccuuacgaggagacgcauuccagcccugggg

SEQ ID NO: 1823 - RNA, 37 nt, Artificial Sequence
  Description of Artificial Sequence: Synthetic oligonucleotide
auugcuccuuacgaggagacugcauuccagcccuggg

SEQ ID NO: 1824 - RNA, 37 nt, Artificial Sequence
  Description of Artificial Sequence: Synthetic oligonucleotide
auugcuccuuacgaggagacauuuugcauuccagccc

SEQ ID NO: 1825 - RNA, 37 nt, Artificial Sequence
  Description of Artificial Sequence: Synthetic oligonucleotide
auugcuccuuacgaggagaccauccagucagggucca

SEQ ID NO: 1826 - RNA, 37 nt, Artificial Sequence
  Description of Artificial Sequence: Synthetic oligonucleotide
auugcuccuuacgaggagacuccacgcuguaggcucc

SEQ ID NO: 1827 - RNA, 37 nt, Artificial Sequence
  Description of Artificial Sequence: Synthetic oligonucleotide
auugcuccuuacgaggagacccacacacagguugucc

SEQ ID NO: 1828 - RNA, 37 nt, Artificial Sequence
  Description of Artificial Sequence: Synthetic oligonucleotide
auugcuccuuacgaggagacuccacugguccugucug

SEQ ID NO: 1829 - RNA, 37 nt, Artificial Sequence
  Description of Artificial Sequence: Synthetic oligonucleotide
auugcuccuuacgaggagaccugaaggccggcuccgg

SEQ ID NO: 1830 - DNA, 37 bp, Artificial Sequence
  Description of Artificial Sequence: Synthetic oligonucleotide
attgctccttacgaggagacgaagctatgttttccat

SEQ ID NO: 1831 - DNA, 37 bp, Artificial Sequence
  Description of Artificial Sequence: Synthetic oligonucleotide
attgctccttacgaggagacgcaggggcagccgcccc

SEQ ID NO: 1832 - DNA, 37 bp, Artificial Sequence
  Description of Artificial Sequence: Synthetic oligonucleotide
attgctccttacgaggagacctcctagaacccaacag

SEQ ID NO: 1833 - DNA, 37 bp, Artificial Sequence
  Description of Artificial Sequence: Synthetic oligonucleotide
attgctccttacgaggagacgaaagacctcctctgtg

SEQ ID NO: 1834 - DNA, 37 bp, Artificial Sequence
  Description of Artificial Sequence: Synthetic oligonucleotide
attgctccttacgaggagactccatctcggggttggc

SEQ ID NO: 1835 - DNA, 37 bp, Artificial Sequence
  Description of Artificial Sequence: Synthetic oligonucleotide
attgctccttacgaggagacttcctgatggtggagat

SEQ ID NO: 1836 - DNA, 37 bp, Artificial Sequence
  Description of Artificial Sequence: Synthetic oligonucleotide
attgctccttacgaggagacctgactcccagctctga

SEQ ID NO: 1837 - DNA, 37 bp, Artificial Sequence
  Description of Artificial Sequence: Synthetic oligonucleotide
attgctccttacgaggagactggggtcagagctggga

SEQ ID NO: 1838 - DNA, 37 bp, Artificial Sequence; identical to SEQ ID NO: 1833
  Description of Artificial Sequence: Synthetic oligonucleotide

SEQ ID NO: 1839 - DNA, 37 bp, Artificial Sequence
  Description of Artificial Sequence: Synthetic oligonucleotide
attgctccttacgaggagaccgaagctatgttttcca

SEQ ID NO: 1840 - DNA, 37 bp, Artificial Sequence; identical to SEQ ID NO: 1830
  Description of Artificial Sequence: Synthetic oligonucleotide

SEQ ID NO: 1841 - DNA, 37 bp, Artificial Sequence
  Description of Artificial Sequence: Synthetic oligonucleotide
attgctccttacgaggagactccatctccaccatcag

SEQ ID NO: 1842 - DNA, 37 bp, Artificial Sequence
  Description of Artificial Sequence: Synthetic oligonucleotide
attgctccttacgaggagacccatctccaccatcagg

SEQ ID NO: 1843 - DNA, 37 bp, Artificial Sequence
  Description of Artificial Sequence: Synthetic oligonucleotide
attgctccttacgaggagacctgatggtggagatgga

SEQ ID NO: 1844 - DNA, 37 bp, Artificial Sequence
  Description of Artificial Sequence: Synthetic oligonucleotide
attgctccttacgaggagaccatctccaccatcagga

SEQ ID NO: 1845 - DNA, 37 bp, Artificial Sequence; identical to SEQ ID NO: 1835
  Description of Artificial Sequence: Synthetic oligonucleotide

SEQ ID NO: 1846 - DNA, 37 bp, Artificial Sequence; identical to SEQ ID NO: 1831
  Description of Artificial Sequence: Synthetic oligonucleotide

SEQ ID NO: 1847 - DNA, 37 bp, Artificial Sequence; identical to SEQ ID NO: 1834
  Description of Artificial Sequence: Synthetic oligonucleotide

SEQ ID NO: 1848 - DNA, 37 bp, Artificial Sequence
  Description of Artificial Sequence: Synthetic oligonucleotide
attgctccttacgaggagactaggagcaaattgtcca

SEQ ID NO: 1849 - DNA, 37 bp, Artificial Sequence
  Description of Artificial Sequence: Synthetic oligonucleotide
attgctccttacgaggagacggttctaggagcaaatt

SEQ ID NO: 1850 - DNA, 37 bp, Artificial Sequence
  Description of Artificial Sequence: Synthetic oligonucleotide
attgctccttacgaggagacgctcctagaacccaaca

SEQ ID NO: 1851 - DNA, 37 bp, Artificial Sequence; identical to SEQ ID NO: 1832
  Description of Artificial Sequence: Synthetic oligonucleotide

SEQ ID NO: 1852 - DNA, 37 bp, Artificial Sequence
  Description of Artificial Sequence: Synthetic oligonucleotide
attgctccttacgaggagactccagacgccatctttc

SEQ ID NO: 1853 - DNA, 37 bp, Artificial Sequence
  Description of Artificial Sequence: Synthetic oligonucleotide
attgctccttacgaggagactggtaagagtcctcctg

SEQ ID NO: 1854 - DNA, 37 bp, Artificial Sequence
  Description of Artificial Sequence: Synthetic oligonucleotide
attgctccttacgaggagacttacagcatcttgggtc

SEQ ID NO: 1855 - DNA, 37 bp, Artificial Sequence
  Description of Artificial Sequence: Synthetic oligonucleotide
attgctccttacgaggagacggtcaggtgggccggca

SEQ ID NO: 1856 - DNA, 37 bp, Artificial Sequence
  Description of Artificial Sequence: Synthetic oligonucleotide
attgctccttacgaggagacctatcattggagatgac

SEQ ID NO: 1857 - DNA, 37 bp, Artificial Sequence
  Description of Artificial Sequence: Synthetic oligonucleotide
attgctccttacgaggagacgagatgacattaaccgg

SEQ ID NO: 1858 - DNA, 37 bp, Artificial Sequence
  Description of Artificial Sequence: Synthetic oligonucleotide
attgctccttacgaggagactggaactctgtgtcgta

SEQ ID NO: 1859 - DNA, 37 bp, Artificial Sequence
  Description of Artificial Sequence: Synthetic oligonucleotide
attgctccttacgaggagaccagaatttactggagca

SEQ ID NO: 1860 - DNA, 37 bp, Artificial Sequence
  Description of Artificial Sequence: Synthetic oligonucleotide
attgctccttacgaggagacactggagcagctgcagc

SEQ ID NO: 1861 - DNA, 37 bp, Artificial Sequence
  Description of Artificial Sequence: Synthetic oligonucleotide
attgctccttacgaggagacccagctgtgggctgcag

SEQ ID NO: 1862 - DNA, 37 bp, Artificial Sequence
  Description of Artificial Sequence: Synthetic oligonucleotide
attgctccttacgaggagacgtaggcattcccagctg

SEQ ID NO: 1863 - DNA, 37 bp, Artificial Sequence
  Description of Artificial Sequence: Synthetic oligonucleotide
attgctccttacgaggagacgtgaagagttcgtaggc

SEQ ID NO: 1864 - DNA, 37 bp, Artificial Sequence
  Description of Artificial Sequence: Synthetic oligonucleotide
attgctccttacgaggagacaccaagattgcctccag

SEQ ID NO: 1865 - DNA, 37 bp, Artificial Sequence
  Description of Artificial Sequence: Synthetic oligonucleotide
attgctccttacgaggagaccctccaggtacccacca

SEQ ID NO: 1866 - DNA, 37 bp, Artificial Sequence
  Description of Artificial Sequence: Synthetic oligonucleotide
attgctccttacgaggagacctaatgtggatactaac

SEQ ID NO: 1867 - DNA, 37 bp, Artificial Sequence
  Description of Artificial Sequence: Synthetic oligonucleotide
attgctccttacgaggagacttccgtgtggcagctga

SEQ ID NO: 1868 - DNA, 37 bp, Artificial Sequence
  Description of Artificial Sequence: Synthetic oligonucleotide
attgctccttacgaggagacctgatggcaacttcaac

SEQ ID NO: 1869 - DNA, 37 bp, Artificial Sequence
  Description of Artificial Sequence: Synthetic oligonucleotide
attgctccttacgaggagactactttgctagcaaact

SEQ ID NO: 1870 - DNA, 37 bp, Artificial Sequence
  Description of Artificial Sequence: Synthetic oligonucleotide
attgctccttacgaggagacagcaccagtttgctagc

SEQ ID NO: 1871 - DNA, 37 bp, Artificial Sequence
  Description of Artificial Sequence: Synthetic oligonucleotide
attgctccttacgaggagacaactggggccgggttgt

SEQ ID NO: 1872 - DNA, 37 bp, Artificial Sequence
  Description of Artificial Sequence: Synthetic oligonucleotide
attgctccttacgaggagacttctctttcctgtagga

SEQ ID NO: 1873 - DNA, 37 bp, Artificial Sequence
  Description of Artificial Sequence: Synthetic oligonucleotide
attgctccttacgaggagactctttcctgtaggatga

SEQ ID NO: 1874 - DNA, 37 bp, Artificial Sequence
  Description of Artificial Sequence: Synthetic oligonucleotide
attgctccttacgaggagaccctgtaggatgattgct

SEQ ID NO: 1875 - DNA, 37 bp, Artificial Sequence
  Description of Artificial Sequence: Synthetic oligonucleotide
attgctccttacgaggagacctgtaggatgattgcta

SEQ ID NO: 1876 - DNA, 37 bp, Artificial Sequence; identical to SEQ ID NO: 1866
  Description of Artificial Sequence: Synthetic oligonucleotide

SEQ ID NO: 1877 - DNA, 37 bp, Artificial Sequence; identical to SEQ ID NO: 1867
  Description of Artificial Sequence: Synthetic oligonucleotide

SEQ ID NO: 1878 - DNA, 37 bp, Artificial Sequence
  Description of Artificial Sequence: Synthetic oligonucleotide
attgctccttacgaggagaccgtgtggcagctgacat

SEQ ID NO: 1879 - DNA, 37 bp, Artificial Sequence
  Description of Artificial Sequence: Synthetic oligonucleotide
attgctccttacgaggagacccatcagcaaacatgtc

SEQ ID NO: 1880 - DNA, 37 bp, Artificial Sequence
  Description of Artificial Sequence: Synthetic oligonucleotide
attgctccttacgaggagacaagttgccatcagcaaa

SEQ ID NO: 1881 - DNA, 37 bp, Artificial Sequence
  Description of Artificial Sequence: Synthetic oligonucleotide
attgctccttacgaggagacgctgatggcaacttcaa

SEQ ID NO: 1882 - DNA, 37 bp, Artificial Sequence; identical to SEQ ID NO: 1868
  Description of Artificial Sequence: Synthetic oligonucleotide

SEQ ID NO: 1883 - DNA, 37 bp, Artificial Sequence; identical to SEQ ID NO: 1871
  Description of Artificial Sequence: Synthetic oligonucleotide

SEQ ID NO: 1884 - DNA, 37 bp, Artificial Sequence
  Description of Artificial Sequence: Synthetic oligonucleotide
attgctccttacgaggagacttgcccttttctacttt

SEQ ID NO: 1885 - DNA, 37 bp, Artificial Sequence
  Description of Artificial Sequence: Synthetic oligonucleotide
attgctccttacgaggagaccccttttctactttgct

SEQ ID NO: 1886 - DNA, 37 bp, Artificial Sequence
  Description of Artificial Sequence: Synthetic oligonucleotide
attgctccttacgaggagacctagcaaagtagaaaag

SEQ ID NO: 1887 - DNA, 37 bp, Artificial Sequence
  Description of Artificial Sequence: Synthetic oligonucleotide
attgctccttacgaggagacgctagcaaagtagaaaa

SEQ ID NO: 1888 - DNA, 37 bp, Artificial Sequence
  Description of Artificial Sequence: Synthetic oligonucleotide
attgctccttacgaggagactctactttgctagcaaa

SEQ ID NO: 1889 - DNA, 37 bp, Artificial Sequence
  Description of Artificial Sequence: Synthetic oligonucleotide
attgctccttacgaggagacctactttgctagcaaac

SEQ ID NO: 1890 - DNA, 37 bp, Artificial Sequence; identical to SEQ ID NO: 1869
  Description of Artificial Sequence: Synthetic oligonucleotide

SEQ ID NO: 1891 - DNA, 37 bp, Artificial Sequence
  Description of Artificial Sequence: Synthetic oligonucleotide
attgctccttacgaggagacgctagcaaactggtgct

SEQ ID NO: 1892 - DNA, 37 bp, Artificial Sequence
  Description of Artificial Sequence: Synthetic oligonucleotide
attgctccttacgaggagacctagcaaactggtgctc

SEQ ID NO: 1893 - DNA, 37 bp, Artificial Sequence; identical to SEQ ID NO: 1870
  Description of Artificial Sequence: Synthetic oligonucleotide

SEQ ID NO: 1894 - DNA, 37 bp, Artificial Sequence
  Description of Artificial Sequence: Synthetic oligonucleotide
attgctccttacgaggagacccactttgtcagtgcgt

SEQ ID NO: 1895 - DNA, 37 bp, Artificial Sequence
  Description of Artificial Sequence: Synthetic oligonucleotide
attgctccttacgaggagacctcaatgggatggaagg

SEQ ID NO: 1896 - DNA, 37 bp, Artificial Sequence
  Description of Artificial Sequence: Synthetic oligonucleotide
attgctccttacgaggagacaggaatacatggtacac

SEQ ID NO: 1897 - DNA, 37 bp, Artificial Sequence
  Description of Artificial Sequence: Synthetic oligonucleotide
attgctccttacgaggagacaagaacattttcagctt

SEQ ID NO: 1898 - DNA, 37 bp, Artificial Sequence
  Description of Artificial Sequence: Synthetic oligonucleotide
attgctccttacgaggagacatccactttcattctgc

SEQ ID NO: 1899 - DNA, 37 bp, Artificial Sequence
  Description of Artificial Sequence: Synthetic oligonucleotide
attgctccttacgaggagactttgttaaaggaggcaa

SEQ ID NO: 1900 - DNA, 37 bp, Artificial Sequence
  Description of Artificial Sequence: Synthetic oligonucleotide
attgctccttacgaggagactccccagagtccatgtc

SEQ ID NO: 1901 - DNA, 37 bp, Artificial Sequence
  Description of Artificial Sequence: Synthetic oligonucleotide
attgctccttacgaggagactcagtgcgtctgacatg

SEQ ID NO: 1902 - DNA, 37 bp, Artificial Sequence
  Description of Artificial Sequence: Synthetic oligonucleotide
attgctccttacgaggagacgtcagtgcgtctgacat

SEQ ID NO: 1903 - DNA, 37 bp, Artificial Sequence; identical to SEQ ID NO: 1894
  Description of Artificial Sequence: Synthetic oligonucleotide

SEQ ID NO: 1904 - DNA, 37 bp, Artificial Sequence
  Description of Artificial Sequence: Synthetic oligonucleotide
attgctccttacgaggagactgttcccactttgtcag

SEQ ID NO: 1905 - DNA, 37 bp, Artificial Sequence; identical to SEQ ID NO: 1895
  Description of Artificial Sequence: Synthetic oligonucleotide

SEQ ID NO: 1906 - DNA, 37 bp, Artificial Sequence
  Description of Artificial Sequence: Synthetic oligonucleotide
attgctccttacgaggagaccatcccattgaggaata

SEQ ID NO: 1907 - DNA, 37 bp, Artificial Sequence; identical to SEQ ID NO: 1896
  Description of Artificial Sequence: Synthetic oligonucleotide

SEQ ID NO: 1908 - DNA, 37 bp, Artificial Sequence
  Description of Artificial Sequence: Synthetic oligonucleotide
attgctccttacgaggagacaacgtgtaccatgtatt

SEQ ID NO: 1909 - DNA, 37 bp, Artificial Sequence
  Description of Artificial Sequence: Synthetic oligonucleotide
attgctccttacgaggagacttcaacgtgtaccatgt

SEQ ID NO: 1910 - DNA, 37 bp, Artificial Sequence; identical to SEQ ID NO: 1897
  Description of Artificial Sequence: Synthetic oligonucleotide

SEQ ID NO: 1911 - DNA, 37 bp, Artificial Sequence
  Description of Artificial Sequence: Synthetic oligonucleotide
attgctccttacgaggagacgagaagctgaaaatgtt

SEQ ID NO: 1912 - DNA, 37 bp, Artificial Sequence
  Description of Artificial Sequence: Synthetic oligonucleotide
attgctccttacgaggagactcagcttctcgaacgca

SEQ ID NO: 1913 - DNA, 37 bp, Artificial Sequence
  Description of Artificial Sequence: Synthetic oligonucleotide
attgctccttacgaggagaccagcttctcgaacgcag

SEQ ID NO: 1914 - DNA, 37 bp, Artificial Sequence
  Description of Artificial Sequence: Synthetic oligonucleotide
attgctccttacgaggagactgcgttcgagaagctga

SEQ ID NO: 1915 - DNA, 37 bp, Artificial Sequence
  Description of Artificial Sequence: Synthetic oligonucleotide
attgctccttacgaggagacagcttctcgaacgcaga

SEQ ID NO: 1916 - DNA, 37 bp, Artificial Sequence
  Description of Artificial Sequence: Synthetic oligonucleotide
attgctccttacgaggagacattctgcgttcgagaag

SEQ ID NO: 1917 - DNA, 37 bp, Artificial Sequence
  Description of Artificial Sequence: Synthetic oligonucleotide
attgctccttacgaggagaccattctgcgttcgagaa

SEQ ID NO: 1918 - DNA, 37 bp, Artificial Sequence
  Description of Artificial Sequence: Synthetic oligonucleotide
attgctccttacgaggagactcgaacgcagaatgaaa

SEQ ID NO: 1919 - DNA, 37 bp, Artificial Sequence; identical to SEQ ID NO: 1898
  Description of Artificial Sequence: Synthetic oligonucleotide

SEQ ID NO: 1920 - DNA, 37 bp, Artificial Sequence
  Description of Artificial Sequence: Synthetic oligonucleotide
attgctccttacgaggagactatccactttcattctg

SEQ ID NO: 1921 - DNA, 37 bp, Artificial Sequence
  Description of Artificial Sequence: Synthetic oligonucleotide
attgctccttacgaggagacttatccactttcattct

SEQ ID NO: 1922 - DNA, 37 bp, Artificial Sequence
  Description of Artificial Sequence: Synthetic oligonucleotide
attgctccttacgaggagactttatccactttcattc

SEQ ID NO: 1923 - DNA, 37 bp, Artificial Sequence
  Description of Artificial Sequence: Synthetic oligonucleotide
attgctccttacgaggagacttttatccactttcatt

SEQ ID NO: 1924 - DNA, 37 bp, Artificial Sequence
  Description of Artificial Sequence: Synthetic oligonucleotide
attgctccttacgaggagacaacaaagaagggtcatc

SEQ ID NO: 1925 - DNA, 37 bp, Artificial Sequence
  Description of Artificial Sequence: Synthetic oligonucleotide
attgctccttacgaggagaccctcctttaacaaagaa

SEQ ID NO: 1926 - DNA, 37 bp, Artificial Sequence
  Description of Artificial Sequence: Synthetic oligonucleotide
attgctccttacgaggagacgcctcctttaacaaaga

SEQ ID NO: 1927 - DNA, 37 bp, Artificial Sequence; identical to SEQ ID NO: 1899
  Description of Artificial Sequence: Synthetic oligonucleotide

SEQ ID NO: 1928 - DNA, 37 bp, Artificial Sequence
  Description of Artificial Sequence: Synthetic oligonucleotide
attgctccttacgaggagacgttaaaggaggcaaaga

SEQ ID NO: 1929 - DNA, 37 bp, Artificial Sequence
  Description of Artificial Sequence: Synthetic oligonucleotide
attgctccttacgaggagacttaaaggaggcaaagac

SEQ ID NO: 1930 - DNA, 37 bp, Artificial Sequence
  Description of Artificial Sequence: Synthetic oligonucleotide
attgctccttacgaggagactctttgcctcctttaac

SEQ ID NO: 1931 - DNA, 37 bp, Artificial Sequence
  Description of Artificial Sequence: Synthetic oligonucleotide
attgctccttacgaggagacgtctttgcctcctttaa

SEQ ID NO: 1932 - DNA, 37 bp, Artificial Sequence
  Description of Artificial Sequence: Synthetic oligonucleotide
attgctccttacgaggagacgtctaacttactttgtc

SEQ ID NO: 1933 - DNA, 37 bp, Artificial Sequence
  Description of Artificial Sequence: Synthetic oligonucleotide
attgctccttacgaggagacttggtctaacttacttt

SEQ ID NO: 1934 - DNA, 20 bp, Artificial Sequence
  Description of Artificial Sequence: Synthetic oligonucleotide
agcaggctgttgtgtgacat

SEQ ID NO: 1935 - DNA, 20 bp, Artificial Sequence
  Description of Artificial Sequence: Synthetic oligonucleotide
catgtcacacaacagcctgc

SEQ ID NO: 1936 - DNA, 20 bp, Artificial Sequence
  Description of Artificial Sequence: Synthetic oligonucleotide
tgtgacatggaaggtgatga

SEQ ID NO: 1937 - DNA, 20 bp, Artificial Sequence
  Description of Artificial Sequence: Synthetic oligonucleotide
atcaccttccatgtcacaca

SEQ ID NO: 1938 - DNA, 20 bp, Artificial Sequence
  Description of Artificial Sequence: Synthetic oligonucleotide
gcataagcctccctggtctc

SEQ ID NO: 1939 - DNA, 20 bp, Artificial Sequence
  Description of Artificial Sequence: Synthetic oligonucleotide
caggactcccagctggaggg

SEQ ID NO: 1940 - DNA, 20 bp, Artificial Sequence
  Description of Artificial Sequence: Synthetic oligonucleotide
ctcaggccctccagctggga

SEQ ID NO: 1941 - DNA, 20 bp, Artificial Sequence
  Description of Artificial Sequence: Synthetic oligonucleotide
tgctggcatctccatactct

SEQ ID NO: 1942 - DNA, 20 bp, Artificial Sequence
  Description of Artificial Sequence: Synthetic oligonucleotide
tgcccaacttctgctggcat

SEQ ID NO: 1943 - DNA, 20 bp, Artificial Sequence
  Description of Artificial Sequence: Synthetic oligonucleotide
ctgcccaacttctgctggca

SEQ ID NO: 1944 - DNA, 20 bp, Artificial Sequence
  Description of Artificial Sequence: Synthetic oligonucleotide
tctgcccaacttctgctggc

SEQ ID NO: 1945 - DNA, 20 bp, Artificial Sequence
  Description of Artificial Sequence: Synthetic oligonucleotide
tgacttttctgcccaacttc

SEQ ID NO: 1946 - DNA, 20 bp, Artificial Sequence
  Description of Artificial Sequence: Synthetic oligonucleotide
ctgacttttctgcccaactt

SEQ ID NO: 1947 - DNA, 20 bp, Artificial Sequence
  Description of Artificial Sequence: Synthetic oligonucleotide
tctgacttttctgcccaact

SEQ ID NO: 1948 - DNA, 20 bp, Artificial Sequence
  Description of Artificial Sequence: Synthetic oligonucleotide
ccagaggagcttccggcaga

SEQ ID NO: 1949 - DNA, 20 bp, Artificial Sequence
  Description of Artificial Sequence: Synthetic oligonucleotide
aggtctgccggaagctcctc

SEQ ID NO: 1950 - DNA, 20 bp, Artificial Sequence
  Description of Artificial Sequence: Synthetic oligonucleotide
cggcagacctgaagcactgg

SEQ ID NO: 1951 - DNA, 20 bp, Artificial Sequence
  Description of Artificial Sequence: Synthetic oligonucleotide
cagtgcttcaggtctgccgg

SEQ ID NO: 1952 - DNA, 20 bp, Artificial Sequence
  Description of Artificial Sequence: Synthetic oligonucleotide
aacagcgcaggcagtggcag

SEQ ID NO: 1953 - DNA, 20 bp, Artificial Sequence
  Description of Artificial Sequence: Synthetic oligonucleotide
aaccaggagccagcctccgg

SEQ ID NO: 1954 - DNA, 20 bp, Artificial Sequence
  Description of Artificial Sequence: Synthetic oligonucleotide
tccaggcgcatctggccgga

SEQ ID NO: 1955 - DNA, 20 bp, Artificial Sequence
  Description of Artificial Sequence: Synthetic oligonucleotide
ctccaggcgcatctggccgg

SEQ ID NO: 1956 - DNA, 20 bp, Artificial Sequence
  Description of Artificial Sequence: Synthetic oligonucleotide
tctccaggcgcatctggccg

SEQ ID NO: 1957 - DNA, 20 bp, Artificial Sequence
  Description of Artificial Sequence: Synthetic oligonucleotide
ctccagttcctcgttgagct

SEQ ID NO: 1958 - DNA, 20 bp, Artificial Sequence
  Description of Artificial Sequence: Synthetic oligonucleotide
tccagttcctcgttgagctg

SEQ ID NO: 1959 - DNA, 20 bp, Artificial Sequence
  Description of Artificial Sequence: Synthetic oligonucleotide
aggcagctcaacgaggaact

SEQ ID NO: 1960 - DNA, 20 bp, Artificial Sequence
  Description of Artificial Sequence: Synthetic oligonucleotide
ctcgttgagctgcctgaatc

SEQ ID NO: 1961 - DNA, 20 bp, Artificial Sequence
  Description of Artificial Sequence: Synthetic oligonucleotide
agctgcctgaatctccctga

SEQ ID NO: 1962 - DNA, 20 bp, Artificial Sequence
  Description of Artificial Sequence: Synthetic oligonucleotide
gtccccaccatctccactct

SEQ ID NO: 1963 - DNA, 20 bp, Artificial Sequence
  Description of Artificial Sequence: Synthetic oligonucleotide
tccccaccatctccactctg

SEQ ID NO: 1964 - DNA, 20 bp, Artificial Sequence
  Description of Artificial Sequence: Synthetic oligonucleotide
ccagagcccatggggcagag

SEQ ID NO: 1965 - DNA, 20 bp, Artificial Sequence
  Description of Artificial Sequence: Synthetic oligonucleotide
gccagagcccatggggcaga

SEQ ID NO: 1966 - DNA, 20 bp, Artificial Sequence
  Description of Artificial Sequence: Synthetic oligonucleotide
cagcctcagagatttgccag

SEQ ID NO: 1967 - DNA, 20 bp, Artificial Sequence
  Description of Artificial Sequence: Synthetic oligonucleotide
ggaggccgtggacagtgaat

SEQ ID NO: 1968 - DNA, 20 bp, Artificial Sequence
  Description of Artificial Sequence: Synthetic oligonucleotide
actgtccacggcctcccaac

SEQ ID NO: 1969 - DNA, 20 bp, Artificial Sequence
  Description of Artificial Sequence: Synthetic oligonucleotide
gctccatcagccactgacct

SEQ ID NO: 1970 - DNA, 20 bp, Artificial Sequence
  Description of Artificial Sequence: Synthetic oligonucleotide
aggcatgctgggcaggtcag

SEQ ID NO: 1971 - DNA, 20 bp, Artificial Sequence
  Description of Artificial Sequence: Synthetic oligonucleotide
ctcgggaggtcagggcaggt

SEQ ID NO: 1972 - DNA, 20 bp, Artificial Sequence
  Description of Artificial Sequence: Synthetic oligonucleotide
gctcgggaggtcagggcagg

SEQ ID NO: 1973 - DNA, 20 bp, Artificial Sequence
  Description of Artificial Sequence: Synthetic oligonucleotide
gagacctctccagctgccgg

SEQ ID NO: 1974 - DNA, 20 bp, Artificial Sequence
  Description of Artificial Sequence: Synthetic oligonucleotide
ttggagacctctccagctgc

SEQ ID NO: 1975 - DNA, 20 bp, Artificial Sequence
  Description of Artificial Sequence: Synthetic oligonucleotide
gaagcttgttggagacctct

SEQ ID NO: 1976 - DNA, 20 bp, Artificial Sequence
  Description of Artificial Sequence: Synthetic oligonucleotide
ggaagcttgttggagacctc

SEQ ID NO: 1977 - DNA, 20 bp, Artificial Sequence
  Description of Artificial Sequence: Synthetic oligonucleotide
tggaagcttgttggagacct

SEQ ID NO: 1978 - DNA, 20 bp, Artificial Sequence
  Description of Artificial Sequence: Synthetic oligonucleotide
taccgctcactgcaggacac

SEQ ID NO: 1979 - DNA, 20 bp, Artificial Sequence
  Description of Artificial Sequence: Synthetic oligonucleotide
ctgctgctcctctccagcct

SEQ ID NO: 1980 - DNA, 20 bp, Artificial Sequence
  Description of Artificial Sequence: Synthetic oligonucleotide
ccgctccaggctcttgctgc

SEQ ID NO: 1981 - DNA, 20 bp, Artificial Sequence
  Description of Artificial Sequence: Synthetic oligonucleotide
tgcccagtccggggtggcca

SEQ ID NO: 1982 - DNA, 20 bp, Artificial Sequence
  Description of Artificial Sequence: Synthetic oligonucleotide
ggccagctgccgttctgccc

SEQ ID NO: 1983 - DNA, 20 bp, Artificial Sequence
  Description of Artificial Sequence: Synthetic oligonucleotide
gcagccaacagcacctcagc

SEQ ID NO: 1984 - DNA, 20 bp, Artificial Sequence
  Description of Artificial Sequence: Synthetic oligonucleotide
gctgccaaggagcaccggcg

SEQ ID NO: 1985 - DNA, 20 bp, Artificial Sequence
  Description of Artificial Sequence: Synthetic oligonucleotide
cccagcacagcaatcactcg

SEQ ID NO: 1986 - DNA, 20 bp, Artificial Sequence
  Description of Artificial Sequence: Synthetic oligonucleotide
gcccagcacagcaatcactc

SEQ ID NO: 1987 - DNA, 20 bp, Artificial Sequence
  Description of Artificial Sequence: Synthetic oligonucleotide
ctgtgctgggcaaagctggt

SEQ ID NO: 1988 - DNA, 20 bp, Artificial Sequence
  Description of Artificial Sequence: Synthetic oligonucleotide
ccctgaccagctttgcccag

SEQ ID NO: 1989 - DNA, 20 bp, Artificial Sequence
  Description of Artificial Sequence: Synthetic oligonucleotide
ggctggggcagtgagccggg

SEQ ID NO: 1990 - DNA, 20 bp, Artificial Sequence
  Description of Artificial Sequence: Synthetic oligonucleotide
tggccggcttccccagtacg

SEQ ID NO: 1991 - DNA, 20 bp, Artificial Sequence
  Description of Artificial Sequence: Synthetic oligonucleotide
cccagtacgactttgtcttc

SEQ ID NO: 1992 - DNA, 20 bp, Artificial Sequence
  Description of Artificial Sequence: Synthetic oligonucleotide
gtcttctctgtcccctgcca

SEQ ID NO: 1993 - DNA, 20 bp, Artificial Sequence
  Description of Artificial Sequence: Synthetic oligonucleotide
tcttctctgtcccctgccat

SEQ ID NO: 1994 - DNA, 20 bp, Artificial Sequence
  Description of Artificial Sequence: Synthetic oligonucleotide
tctgtcccctgccattgctt

SEQ ID NO: 1995 - DNA, 20 bp, Artificial Sequence
  Description of Artificial Sequence: Synthetic oligonucleotide
aagcaatggcaggggacaga

SEQ ID NO: 1996 - DNA, 20 bp, Artificial Sequence
  Description of Artificial Sequence: Synthetic oligonucleotide
cttgaaccgtccgggggatg

SEQ ID NO: 1997 - DNA, 20 bp, Artificial Sequence
  Description of Artificial Sequence: Synthetic oligonucleotide
aaccgtccgggggatgccta

SEQ ID NO: 1998 - DNA, 20 bp, Artificial Sequence
  Description of Artificial Sequence: Synthetic oligonucleotide
tccctgggcccacagccact

SEQ ID NO: 1999 - DNA, 20 bp, Artificial Sequence
  Description of Artificial Sequence: Synthetic oligonucleotide
aagatgtggctgaaaacctc

SEQ ID NO: 2000 - DNA, 20 bp, Artificial Sequence
  Description of Artificial Sequence: Synthetic oligonucleotide
tcagccacatcttgaagaga

SEQ ID NO: 2001 - DNA, 20 bp, Artificial Sequence
  Description of Artificial Sequence: Synthetic oligonucleotide
cagccacatcttgaagagac

SEQ ID NO: 2002 - DNA, 20 bp, Artificial Sequence
  Description of Artificial Sequence: Synthetic oligonucleotide
agccacatcttgaagagacc

SEQ ID NO: 2003 - DNA, 20 bp, Artificial Sequence
  Description of Artificial Sequence: Synthetic oligonucleotide
aagagacctgaccgcgttct

SEQ ID NO: 2004 - DNA, 20 bp, Artificial Sequence
  Description of Artificial Sequence: Synthetic oligonucleotide
tgctcatcctagacggcttc

SEQ ID NO: 2005 - DNA, 20 bp, Artificial Sequence
  Description of Artificial Sequence: Synthetic oligonucleotide
cagctcctcgaagccgtcta

SEQ ID NO: 2006 - DNA, 20 bp, Artificial Sequence
  Description of Artificial Sequence: Synthetic oligonucleotide
cgcttccagctcctcgaagc

SEQ ID NO: 2007 - DNA, 20 bp, Artificial Sequence
  Description of Artificial Sequence: Synthetic oligonucleotide
gaggagctggaagcgcaaga

SEQ ID NO: 2008 - DNA, 20 bp, Artificial Sequence
  Description of Artificial Sequence: Synthetic oligonucleotide
ctgcacagcacgtgcggacc

SEQ ID NO: 2009 - DNA, 20 bp, Artificial Sequence
  Description of Artificial Sequence: Synthetic oligonucleotide
tggaaaaggccggccagcag

SEQ ID NO: 2010 - DNA, 20 bp, Artificial Sequence
  Description of Artificial Sequence: Synthetic oligonucleotide
ttctggaaaaggccggccag

SEQ ID NO: 2011 - DNA, 20 bp, Artificial Sequence
  Description of Artificial Sequence: Synthetic oligonucleotide
tccagaagaagctgctccga

SEQ ID NO: 2012 - DNA, 20 bp, Artificial Sequence
  Description of Artificial Sequence: Synthetic oligonucleotide
ccagaagaagctgctccgag

SEQ ID NO: 2013 - DNA, 20 bp, Artificial Sequence
  Description of Artificial Sequence: Synthetic oligonucleotide
cagaagaagctgctccgagg

SEQ ID NO: 2014 - DNA, 20 bp, Artificial Sequence
  Description of Artificial Sequence: Synthetic oligonucleotide
caccctcctcctcacagccc

SEQ ID NO: 2015 - DNA, 20 bp, Artificial Sequence
  Description of Artificial Sequence: Synthetic oligonucleotide
ctcaggctctggaccaggcg

SEQ ID NO: 2016 - DNA, 20 bp, Artificial Sequence
  Description of Artificial Sequence: Synthetic oligonucleotide
gagctgtccggcttctccat

SEQ ID NO: 2017 - DNA, 20 bp, Artificial Sequence
  Description of Artificial Sequence: Synthetic oligonucleotide
agctgtccggcttctccatg

SEQ ID NO: 2018 - DNA, 20 bp, Artificial Sequence
  Description of Artificial Sequence: Synthetic oligonucleotide
tccatggagcaggcccaggc

SEQ ID NO: 2019 - DNA, 20 bp, Artificial Sequence
  Description of Artificial Sequence: Synthetic oligonucleotide
gagagctcagggatgacaga

SEQ ID NO: 2020 - DNA, 20 bp, Artificial Sequence
  Description of Artificial Sequence: Synthetic oligonucleotide
agagctcagggatgacagag

SEQ ID NO: 2021 - DNA, 20 bp, Artificial Sequence
  Description of Artificial Sequence: Synthetic oligonucleotide
gtgctctgtcatccctgagc

SEQ ID NO: 2022 - DNA, 20 bp, Artificial Sequence
  Description of Artificial Sequence: Synthetic oligonucleotide
ttctcagtcacagccacagc

SEQ ID NO: 2023 - DNA, 20 bp, Artificial Sequence
  Description of Artificial Sequence: Synthetic oligonucleotide
tcagtcacagccacagccct

SEQ ID NO: 2024 - DNA, 20 bp, Artificial Sequence
  Description of Artificial Sequence: Synthetic oligonucleotide
gtgccgggcagtgtgccagc

SEQ ID NO: 2025 - DNA, 20 bp, Artificial Sequence
  Description of Artificial Sequence: Synthetic oligonucleotide
tgccgggcagtgtgccagct

SEQ ID NO: 2026 - DNA, 20 bp, Artificial Sequence
  Description of Artificial Sequence: Synthetic oligonucleotide
gcgtcctccccaagctccag

SEQ ID NO: 2027 - DNA, 20 bp, Artificial Sequence
  Description of Artificial Sequence: Synthetic oligonucleotide
gggaggacgccaagctgccc

SEQ ID NO: 2028 - DNA, 20 bp, Artificial Sequence
  Description of Artificial Sequence: Synthetic oligonucleotide
gccagctctgccagggcccc

SEQ ID NO: 2029 - DNA, 20 bp, Artificial Sequence
  Description of Artificial Sequence: Synthetic oligonucleotide
atgtctgcggcccagctccc

SEQ ID NO: 2030 - DNA, 20 bp, Artificial Sequence
  Description of Artificial Sequence: Synthetic oligonucleotide
gatgtctgcggcccagctcc

SEQ ID NO: 2031 - DNA, 20 bp, Artificial Sequence
  Description of Artificial Sequence: Synthetic oligonucleotide
ccatccgcagacgtgaggac

SEQ ID NO: 2032 - DNA, 20 bp, Artificial Sequence
  Description of Artificial Sequence: Synthetic oligonucleotide
gccatcgcccaggtcctcac

SEQ ID NO: 2033 - DNA, 20 bp, Artificial Sequence
  Description of Artificial Sequence: Synthetic oligonucleotide
ggccatcgcccaggtcctca

SEQ ID NO: 2034 - DNA, 20 bp, Artificial Sequence
  Description of Artificial Sequence: Synthetic oligonucleotide
gactaagcctttggccatcg

SEQ ID NO: 2035 - DNA, 20 bp, Artificial Sequence
  Description of Artificial Sequence: Synthetic oligonucleotide
gtccaacacccaccgcgggc

SEQ ID NO: 2036 - DNA, 20 bp, Artificial Sequence
  Description of Artificial Sequence: Synthetic oligonucleotide
caggaggaagctggggaagg

SEQ ID NO: 2037 - DNA, 20 bp, Artificial Sequence
  Description of Artificial Sequence: Synthetic oligonucleotide
cccagcttcctcctgcaatg

SEQ ID NO: 2038 - DNA, 20 bp, Artificial Sequence
  Description of Artificial Sequence: Synthetic oligonucleotide
ctcctgcaatgcttcctggg

SEQ ID NO: 2039 - DNA, 20 bp, Artificial Sequence
  Description of Artificial Sequence: Synthetic oligonucleotide
ctgggggccctgtggctggc

SEQ ID NO: 2040 - DNA, 20 bp, Artificial Sequence
  Description of Artificial Sequence: Synthetic oligonucleotide
gccactcagagccagccaca

SEQ ID NO: 2041 - DNA, 20 bp, Artificial Sequence
  Description of Artificial Sequence: Synthetic oligonucleotide
cgccactcagagccagccac

SEQ ID NO: 2042 - DNA, 20 bp, Artificial Sequence
  Description of Artificial Sequence: Synthetic oligonucleotide
atttcgccactcagagccag

SEQ ID NO: 2043 - DNA, 20 bp, Artificial Sequence
  Description of Artificial Sequence: Synthetic oligonucleotide
tccttgatttcgccactcag

SEQ ID NO: 2044 - DNA, 20 bp, Artificial Sequence
  Description of Artificial Sequence: Synthetic oligonucleotide
gggtcaatgctaggtactgc

SEQ ID NO: 2045 - DNA, 20 bp, Artificial Sequence
  Description of Artificial Sequence: Synthetic oligonucleotide
cttggggtcaatgctaggta

SEQ ID NO: 2046 - DNA, 20 bp, Artificial Sequence
  Description of Artificial Sequence: Synthetic oligonucleotide
ttccttggggtcaatgctag

SEQ ID NO: 2047 - RNA, 20 nt, Artificial Sequence
  Description of Artificial Sequence: Synthetic oligonucleotide
accccaaggaagaagaggcc

SEQ ID NO: 2048 - DNA, 20 bp, Artificial Sequence
  Description of Artificial Sequence: Synthetic oligonucleotide
tcatagggcctcttcttcct

SEQ ID NO: 2049 - DNA, 20 bp, Artificial Sequence
  Description of Artificial Sequence: Synthetic oligonucleotide
ctggctgggctgatcttcca

SEQ ID NO: 2050 - DNA, 20 bp, Artificial Sequence
  Description of Artificial Sequence: Synthetic oligonucleotide
tggctgggctgatcttccag

SEQ ID NO: 2051 - DNA, 20 bp, Artificial Sequence
  Description of Artificial Sequence: Synthetic oligonucleotide
cagcctcccgcccgctgcct

SEQ ID NO: 2052 - DNA, 20 bp, Artificial Sequence
  Description of Artificial Sequence: Synthetic oligonucleotide
ctgtccaccgaggcagccgc

SEQ ID NO: 2053 - DNA, 20 bp, Artificial Sequence
  Description of Artificial Sequence: Synthetic oligonucleotide
tgcttcctgtccaccgaggc

SEQ ID NO: 2054 - DNA, 20 bp, Artificial Sequence
  Description of Artificial Sequence: Synthetic oligonucleotide
aggtacctcgcaagcacctt

SEQ ID NO: 2055 - DNA, 20 bp, Artificial Sequence
  Description of Artificial Sequence: Synthetic oligonucleotide
cgaggtacctgaagcggctg

SEQ ID NO: 2056 - DNA, 20 bp, Artificial Sequence
  Description of Artificial Sequence: Synthetic oligonucleotide
cagcctcctcggcctcgtgg

SEQ ID NO: 2057 - DNA, 20 bp, Artificial Sequence
  Description of Artificial Sequence: Synthetic oligonucleotide
ggcagcacgtggtacaggag

SEQ ID NO: 2058 - DNA, 20 bp, Artificial Sequence
  Description of Artificial Sequence: Synthetic oligonucleotide
gcagcacgtggtacaggagc

SEQ ID NO: 2059 - DNA, 20 bp, Artificial Sequence
  Description of Artificial Sequence: Synthetic oligonucleotide
tctgggcacccgcctcacgc

SEQ ID NO: 2060 - DNA, 20 bp, Artificial Sequence
  Description of Artificial Sequence: Synthetic oligonucleotide
ctgggcacccgcctcacgcc

SEQ ID NO: 2061 - DNA, 20 bp, Artificial Sequence
  Description of Artificial Sequence: Synthetic oligonucleotide
tgggcacccgcctcacgcct

SEQ ID NO: 2062 - DNA, 20 bp, Artificial Sequence
  Description of Artificial Sequence: Synthetic oligonucleotide
cccagtacatgtgcatcagg

SEQ ID NO: 2063 - DNA, 20 bp, Artificial Sequence
  Description of Artificial Sequence: Synthetic oligonucleotide
gcccgccgcctccaaggcct

SEQ ID NO: 2064 - DNA, 20 bp, Artificial Sequence
  Description of Artificial Sequence: Synthetic oligonucleotide
gaggcggcgggccaagactt

SEQ ID NO: 2065 - DNA, 20 bp, Artificial Sequence
  Description of Artificial Sequence: Synthetic oligonucleotide
tccctggacctccgcagcac

SEQ ID NO: 2066 - DNA, 20 bp, Artificial Sequence
  Description of Artificial Sequence: Synthetic oligonucleotide
gcccctctggattggggagc

SEQ ID NO: 2067 - DNA, 20 bp, Artificial Sequence
  Description of Artificial Sequence: Synthetic oligonucleotide
cccctctggattggggagcc

SEQ ID NO: 2068 - DNA, 20 bp, Artificial Sequence
  Description of Artificial Sequence: Synthetic oligonucleotide
gggagcctcgtgggactcag

SEQ ID NO: 2069 - DNA, 20 bp, Artificial Sequence
  Description of Artificial Sequence: Synthetic oligonucleotide
gtctccccatgctgctgcag

SEQ ID NO: 2070 - DNA, 20 bp, Artificial Sequence
  Description of Artificial Sequence: Synthetic oligonucleotide
tcctctgctgcctgaagtag

SEQ ID NO: 2071 - DNA, 20 bp, Artificial Sequence
  Description of Artificial Sequence: Synthetic oligonucleotide
aggcagcagaggagaagttc

SEQ ID NO: 2072 - DNA, 20 bp, Artificial Sequence
  Description of Artificial Sequence: Synthetic oligonucleotide
aaaggctcgatggtgaactt

SEQ ID NO: 2073 - DNA, 20 bp, Artificial Sequence
  Description of Artificial Sequence: Synthetic oligonucleotide
gaaaggctcgatggtgaact

SEQ ID NO: 2074 - DNA, 20 bp, Artificial Sequence
  Description of Artificial Sequence: Synthetic oligonucleotide
accatcgagcctttcaaagc

SEQ ID NO: 2075 - DNA, 20 bp, Artificial Sequence
  Description of Artificial Sequence: Synthetic oligonucleotide
gctttgaaaggctcgatggt

SEQ ID NO: 2076 - DNA, 20 bp, Artificial Sequence
  Description of Artificial Sequence: Synthetic oligonucleotide
agggacttggctttgaaagg

SEQ ID NO: 2077 - DNA, 20 bp, Artificial Sequence
  Description of Artificial Sequence: Synthetic oligonucleotide
caaagccaagtccctgaagg

SEQ ID NO: 2078 - DNA, 20 bp, Artificial Sequence
  Description of Artificial Sequence: Synthetic oligonucleotide
aaagccaagtccctgaagga

SEQ ID NO: 2079 - DNA, 20 bp, Artificial Sequence
  Description of Artificial Sequence: Synthetic oligonucleotide
cacatccttcagggacttgg

SEQ ID NO: 2080 - DNA, 20 bp, Artificial Sequence
  Description of Artificial Sequence: Synthetic oligonucleotide
ccaggtcttccacatccttc

SEQ ID NO: 2081 - DNA, 20 bp, Artificial Sequence
  Description of Artificial Sequence: Synthetic oligonucleotide
cccaggtcttccacatcctt

SEQ ID NO: 2082 - DNA, 20 bp, Artificial Sequence
  Description of Artificial Sequence: Synthetic oligonucleotide
ctcggaagacacagctgggg

SEQ ID NO: 2083 - DNA, 20 bp, Artificial Sequence
  Description of Artificial Sequence: Synthetic oligonucleotide
ggtcccgaacagcagggagc

SEQ ID NO: 2084 - DNA, 20 bp, Artificial Sequence
  Description of Artificial Sequence: Synthetic oligonucleotide
aggtcccgaacagcagggag

SEQ ID NO: 2085 - DNA, 20 bp, Artificial Sequence
  Description of Artificial Sequence: Synthetic oligonucleotide
tttaggtcccgaacagcagg

SEQ ID NO: 2086 - DNA, 20 bp, Artificial Sequence
  Description of Artificial Sequence: Synthetic oligonucleotide
ctttaggtcccgaacagcag

SEQ ID NO: 2087 - DNA, 20 bp, Artificial Sequence
  Description of Artificial Sequence: Synthetic oligonucleotide
gggacctaaagaaactggag

SEQ ID NO: 2088 - DNA, 20 bp, Artificial Sequence
  Description of Artificial Sequence: Synthetic oligonucleotide
gggaaagcctgggggcctga

SEQ ID NO: 2089 - DNA, 20 bp, Artificial Sequence
  Description of Artificial Sequence: Synthetic oligonucleotide
ggggaaagcctgggggcctg

SEQ ID NO: 2090 - DNA, 20 bp, Artificial Sequence
  Description of Artificial Sequence: Synthetic oligonucleotide
ccccaaactggtgcggatcc

SEQ ID NO: 2091 - DNA, 20 bp, Artificial Sequence
  Description of Artificial Sequence: Synthetic oligonucleotide
cccaaactggtgcggatcct

SEQ ID NO: 2092 - DNA, 20 bp, Artificial Sequence
  Description of Artificial Sequence: Synthetic oligonucleotide
ttctcactcagcgcatccag

SEQ ID NO: 2093 - DNA, 20 bp, Artificial Sequence
  Description of Artificial Sequence: Synthetic oligonucleotide
agctgggggaaggtggctga

SEQ ID NO: 2094 - DNA, 20 bp, Artificial Sequence
  Description of Artificial Sequence: Synthetic oligonucleotide
ccccagctgaagtccttgga

SEQ ID NO: 2095 - DNA, 20 bp, Artificial Sequence
  Description of Artificial Sequence: Synthetic oligonucleotide
caaggacttcagctggggga

SEQ ID NO: 2096 - DNA, 20 bp, Artificial Sequence
  Description of Artificial Sequence: Synthetic oligonucleotide
ccaaggacttcagctggggg

SEQ ID NO: 2097 - DNA, 20 bp, Artificial Sequence
  Description of Artificial Sequence: Synthetic oligonucleotide
agggtttccaaggacttcag

SEQ ID NO: 2098 - DNA, 20 bp, Artificial Sequence
  Description of Artificial Sequence: Synthetic oligonucleotide
taggcacccaggtcagtgat

SEQ ID NO: 2099 - DNA, 20 bp, Artificial Sequence
  Description of Artificial Sequence: Synthetic oligonucleotide
gtaggcacccaggtcagtga

SEQ ID NO: 2100 - DNA, 20 bp, Artificial Sequence
  Description of Artificial Sequence: Synthetic oligonucleotide
gctcgctgcatccctgctca

SEQ ID NO: 2101 - DNA, 20 bp, Artificial Sequence
  Description of Artificial Sequence: Synthetic oligonucleotide
gcctgagcagggatgcagcg

SEQ ID NO: 2102 - DNA, 20 bp, Artificial Sequence
  Description of Artificial Sequence: Synthetic oligonucleotide
tacaataactgcatctgcga

SEQ ID NO: 2103 - DNA, 20 bp, Artificial Sequence
  Description of Artificial Sequence: Synthetic oligonucleotide
gctcgtgtgcttccggacat

SEQ ID NO: 2104 - DNA, 20 bp, Artificial Sequence
  Description of Artificial Sequence: Synthetic oligonucleotide
cggacatggtgtccctccgg

SEQ ID NO: 2105 - DNA, 20 bp, Artificial Sequence
  Description of Artificial Sequence: Synthetic oligonucleotide
acggctgccggggcccagca

SEQ ID NO: 2106 - DNA, 20 bp, Artificial Sequence
  Description of Artificial Sequence: Synthetic oligonucleotide
ggaggtgtcctcatgtggag

SEQ ID NO: 2107 - DNA, 20 bp, Artificial Sequence
  Description of Artificial Sequence: Synthetic oligonucleotide
ctggacactgaatgggatgg

SEQ ID NO: 2108 - DNA, 20 bp, Artificial Sequence
  Description of Artificial Sequence: Synthetic oligonucleotide
agtgtccaggaacacctgca

SEQ ID NO: 2109 - DNA, 20 bp, Artificial Sequence
  Description of Artificial Sequence: Synthetic oligonucleotide
caggtgttcctggacactga

SEQ ID NO: 2110 - DNA, 20 bp, Artificial Sequence
  Description of Artificial Sequence: Synthetic oligonucleotide
ttgcaggtgttcctggacac

SEQ ID NO: 2111 - DNA, 20 bp, Artificial Sequence
  Description of Artificial Sequence: Synthetic oligonucleotide
acggatcagcctgagatgat

SEQ ID NO: 2112 - RNA, 56 nt, Artificial Sequence
  Description of Artificial Sequence: Synthetic oligonucleotide
cuuucaagacuaauagauugcuccuuacgaggagacagcaggcuguugugugacau

SEQ ID NO: 2113 - RNA, 56 nt, Artificial Sequence
  Description of Artificial Sequence: Synthetic oligonucleotide
cuuucaagacuaauagauugcuccuuacgaggagaccaugucacacaacagccugc

SEQ ID NO: 2114 - RNA, 56 nt, Artificial Sequence
  Description of Artificial Sequence: Synthetic oligonucleotide
cuuucaagacuaauagauugcuccuuacgaggagacugugacauggaaggugauga

SEQ ID NO: 2115 - RNA, 56 nt, Artificial Sequence
  Description of Artificial Sequence: Synthetic oligonucleotide
cuuucaagacuaauagauugcuccuuacgaggagacaucaccuuccaugucacaca

SEQ ID NO: 2116 - RNA, 56 nt, Artificial Sequence
  Description of Artificial Sequence: Synthetic oligonucleotide
cuuucaagacuaauagauugcuccuuacgaggagacgcauaagccucccuggucuc

SEQ ID NO: 2117 - RNA, 56 nt, Artificial Sequence
  Description of Artificial Sequence: Synthetic oligonucleotide
cuuucaagacuaauagauugcuccuuacgaggagaccaggacucccagcuggaggg

SEQ ID NO: 2118 - RNA, 56 nt, Artificial Sequence
  Description of Artificial Sequence: Synthetic oligonucleotide
cuuucaagacuaauagauugcuccuuacgaggagaccucaggcccuccagcuggga

SEQ ID NO: 2119 - RNA, 56 nt, Artificial Sequence
  Description of Artificial Sequence: Synthetic oligonucleotide
cuuucaagacuaauagauugcuccuuacgaggagacugcuggcaucuccauacucu

SEQ ID NO: 2120 - RNA, 56 nt, Artificial Sequence
  Description of Artificial Sequence: Synthetic oligonucleotide
cuuucaagacuaauagauugcuccuuacgaggagacugcccaacuucugcuggcau

SEQ ID NO: 2121 - RNA, 56 nt, Artificial Sequence
  Description of Artificial Sequence: Synthetic oligonucleotide
cuuucaagacuaauagauugcuccuuacgaggagaccugcccaacuucugcuggca

SEQ ID NO: 2122 - RNA, 56 nt, Artificial Sequence
  Description of Artificial Sequence: Synthetic oligonucleotide
cuuucaagacuaauagauugcuccuuacgaggagacucugcccaacuucugcuggc

SEQ ID NO: 2123 - RNA, 56 nt, Artificial Sequence
  Description of Artificial Sequence: Synthetic oligonucleotide
cuuucaagacuaauagauugcuccuuacgaggagacugacuuuucugcccaacuuc

SEQ ID NO: 2124 - RNA, 56 nt, Artificial Sequence
  Description of Artificial Sequence: Synthetic oligonucleotide
cuuucaagacuaauagauugcuccuuacgaggagaccugacuuuucugcccaacuu

SEQ ID NO: 2125 - RNA, 56 nt, Artificial Sequence
  Description of Artificial Sequence: Synthetic oligonucleotide
cuuucaagacuaauagauugcuccuuacgaggagacucugacuuuucugcccaacu

SEQ ID NO: 2126 - RNA, 56 nt, Artificial Sequence
  Description of Artificial Sequence: Synthetic oligonucleotide
cuuucaagacuaauagauugcuccuuacgaggagacccagaggagcuuccggcaga

SEQ ID NO: 2127 - RNA, 56 nt, Artificial Sequence
  Description of Artificial Sequence: Synthetic oligonucleotide
cuuucaagacuaauagauugcuccuuacgaggagacaggucugccggaagcuccuc

SEQ ID NO: 2128 - RNA, 56 nt, Artificial Sequence
  Description of Artificial Sequence: Synthetic oligonucleotide
cuuucaagacuaauagauugcuccuuacgaggagaccggcagaccugaagcacugg

SEQ ID NO: 2129 - RNA, 56 nt, Artificial Sequence
  Description of Artificial Sequence: Synthetic oligonucleotide
cuuucaagacuaauagauugcuccuuacgaggagaccagugcuucaggucugccgg

SEQ ID NO: 2130 - RNA, 56 nt, Artificial Sequence
  Description of Artificial Sequence: Synthetic oligonucleotide
cuuucaagacuaauagauugcuccuuacgaggagacaacagcgcaggcaguggcag

SEQ ID NO: 2131 - RNA, 56 nt, Artificial Sequence
  Description of Artificial Sequence: Synthetic oligonucleotide
cuuucaagacuaauagauugcuccuuacgaggagacaaccaggagccagccuccgg

SEQ ID NO: 2132 - RNA, 56 nt, Artificial Sequence
  Description of Artificial Sequence: Synthetic oligonucleotide
cuuucaagacuaauagauugcuccuuacgaggagacuccaggcgcaucuggccgga

SEQ ID NO: 2133 - RNA, 56 nt, Artificial Sequence
  Description of Artificial Sequence: Synthetic oligonucleotide
cuuucaagacuaauagauugcuccuuacgaggagaccuccaggcgcaucuggccgg

SEQ ID NO: 2134 - RNA, 56 nt, Artificial Sequence
  Description of Artificial Sequence: Synthetic oligonucleotide
cuuucaagacuaauagauugcuccuuacgaggagacucuccaggcgcaucuggccg

SEQ ID NO: 2135 - RNA, 56 nt, Artificial Sequence
  Description of Artificial Sequence: Synthetic oligonucleotide
cuuucaagacuaauagauugcuccuuacgaggagaccuccaguuccucguugagcu

SEQ ID NO: 2136 - RNA, 56 nt, Artificial Sequence
  Description of Artificial Sequence: Synthetic oligonucleotide
cuuucaagacuaauagauugcuccuuacgaggagacuccaguuccucguugagcug

SEQ ID NO: 2137 - RNA, 56 nt, Artificial Sequence
  Description of Artificial Sequence: Synthetic oligonucleotide
cuuucaagacuaauagauugcuccuuacgaggagacaggcagcucaacgaggaacu

SEQ ID NO: 2138 - RNA, 56 nt, Artificial Sequence
  Description of Artificial Sequence: Synthetic oligonucleotide
cuuucaagacuaauagauugcuccuuacgaggagaccucguugagcugccugaauc

SEQ ID NO: 2139 - RNA, 56 nt, Artificial Sequence
  Description of Artificial Sequence: Synthetic oligonucleotide
cuuucaagacuaauagauugcuccuuacgaggagacagcugccugaaucucccuga

SEQ ID NO: 2140 - RNA, 56 nt, Artificial Sequence
  Description of Artificial Sequence: Synthetic oligonucleotide
cuuucaagacuaauagauugcuccuuacgaggagacguccccaccaucuccacucu

SEQ ID NO: 2141 - RNA, 56 nt, Artificial Sequence
  Description of Artificial Sequence: Synthetic oligonucleotide
cuuucaagacuaauagauugcuccuuacgaggagacuccccaccaucuccacucug

SEQ ID NO: 2142 - RNA, 56 nt, Artificial Sequence
  Description of Artificial Sequence: Synthetic oligonucleotide
cuuucaagacuaauagauugcuccuuacgaggagacccagagcccauggggcagag

SEQ ID NO: 2143 - RNA, 56 nt, Artificial Sequence
  Description of Artificial Sequence: Synthetic oligonucleotide
cuuucaagacuaauagauugcuccuuacgaggagacgccagagcccauggggcaga

SEQ ID NO: 2144 - RNA, 56 nt, Artificial Sequence
  Description of Artificial Sequence: Synthetic oligonucleotide
cuuucaagacuaauagauugcuccuuacgaggagaccagccucagagauuugccag

SEQ ID NO: 2145 - RNA, 56 nt, Artificial Sequence
  Description of Artificial Sequence: Synthetic oligonucleotide
cuuucaagacuaauagauugcuccuuacgaggagacggaggccguggacagugaau

SEQ ID NO: 2146 - RNA, 56 nt, Artificial Sequence
  Description of Artificial Sequence: Synthetic oligonucleotide
cuuucaagacuaauagauugcuccuuacgaggagacacuguccacggccucccaac

SEQ ID NO: 2147 - RNA, 56 nt, Artificial Sequence
  Description of Artificial Sequence: Synthetic oligonucleotide
cuuucaagacuaauagauugcuccuuacgaggagacgcuccaucagccacugaccu

SEQ ID NO: 2148 - RNA, 56 nt, Artificial Sequence
  Description of Artificial Sequence: Synthetic oligonucleotide
cuuucaagacuaauagauugcuccuuacgaggagacaggcaugcugggcaggucag

SEQ ID NO: 2149 - RNA, 56 nt, Artificial Sequence
  Description of Artificial Sequence: Synthetic oligonucleotide
cuuucaagacuaauagauugcuccuuacgaggagaccucgggaggucagggcaggu

SEQ ID NO: 2150 - RNA, 56 nt, Artificial Sequence
  Description of Artificial Sequence: Synthetic oligonucleotide
cuuucaagacuaauagauugcuccuuacgaggagacgcucgggaggucagggcagg

SEQ ID NO: 2151 - RNA, 56 nt, Artificial Sequence
  Description of Artificial Sequence: Synthetic oligonucleotide
cuuucaagacuaauagauugcuccuuacgaggagacgagaccucuccagcugccgg

SEQ ID NO: 2152 - RNA, 56 nt, Artificial Sequence
  Description of Artificial Sequence: Synthetic oligonucleotide
cuuucaagacuaauagauugcuccuuacgaggagacuuggagaccucuccagcugc

SEQ ID NO: 2153 - RNA, 56 nt, Artificial Sequence
  Description of Artificial Sequence: Synthetic oligonucleotide
cuuucaagacuaauagauugcuccuuacgaggagacgaagcuuguuggagaccucu

SEQ ID NO: 2154 - RNA, 56 nt, Artificial Sequence
  Description of Artificial Sequence: Synthetic oligonucleotide
cuuucaagacuaauagauugcuccuuacgaggagacggaagcuuguuggagaccuc

SEQ ID NO: 2155 - RNA, 56 nt, Artificial Sequence
  Description of Artificial Sequence: Synthetic oligonucleotide
cuuucaagacuaauagauugcuccuuacgaggagacuggaagcuuguuggagaccu

SEQ ID NO: 2156 - RNA, 56 nt, Artificial Sequence
  Description of Artificial Sequence: Synthetic oligonucleotide
cuuucaagacuaauagauugcuccuuacgaggagacuaccgcucacugcaggacac

SEQ ID NO: 2157 - RNA, 56 nt, Artificial Sequence
  Description of Artificial Sequence: Synthetic oligonucleotide
cuuucaagacuaauagauugcuccuuacgaggagaccugcugcuccucuccagccu

SEQ ID NO: 2158 - RNA, 56 nt, Artificial Sequence
  Description of Artificial Sequence: Synthetic oligonucleotide
cuuucaagacuaauagauugcuccuuacgaggagacccgcuccaggcucuugcugc

SEQ ID NO: 2159 - RNA, 56 nt, Artificial Sequence
  Description of Artificial Sequence: Synthetic oligonucleotide
cuuucaagacuaauagauugcuccuuacgaggagacugcccaguccgggguggcca

SEQ ID NO: 2160 - RNA, 56 nt, Artificial Sequence
  Description of Artificial Sequence: Synthetic oligonucleotide
cuuucaagacuaauagauugcuccuuacgaggagacggccagcugccguucugccc

SEQ ID NO: 2161 - RNA, 56 nt, Artificial Sequence
  Description of Artificial Sequence: Synthetic oligonucleotide
cuuucaagacuaauagauugcuccuuacgaggagacgcagccaacagcaccucagc

SEQ ID NO: 2162 - RNA, 56 nt, Artificial Sequence
  Description of Artificial Sequence: Synthetic oligonucleotide
cuuucaagacuaauagauugcuccuuacgaggagacgcugccaaggagcaccggcg

SEQ ID NO: 2163 - RNA, 56 nt, Artificial Sequence
  Description of Artificial Sequence: Synthetic oligonucleotide
cuuucaagacuaauagauugcuccuuacgaggagaccccagcacagcaaucacucg

SEQ ID NO: 2164 - RNA, 56 nt, Artificial Sequence
  Description of Artificial Sequence: Synthetic oligonucleotide
cuuucaagacuaauagauugcuccuuacgaggagacgcccagcacagcaaucacuc

SEQ ID NO: 2165 - RNA, 56 nt, Artificial Sequence
  Description of Artificial Sequence: Synthetic oligonucleotide
cuuucaagacuaauagauugcuccuuacgaggagaccugugcugggcaaagcuggu

SEQ ID NO: 2166 - RNA, 56 nt, Artificial Sequence
  Description of Artificial Sequence: Synthetic oligonucleotide
cuuucaagacuaauagauugcuccuuacgaggagaccccugaccagcuuugcccag

SEQ ID NO: 2167 - RNA, 56 nt, Artificial Sequence
  Description of Artificial Sequence: Synthetic oligonucleotide
cuuucaagacuaauagauugcuccuuacgaggagacggcuggggcagugagccggg

SEQ ID NO: 2168 - RNA, 56 nt, Artificial Sequence
  Description of Artificial Sequence: Synthetic oligonucleotide
cuuucaagacuaauagauugcuccuuacgaggagacuggccggcuuccccaguacg

SEQ ID NO: 2169 - RNA, 56 nt, Artificial Sequence
  Description of Artificial Sequence: Synthetic oligonucleotide
cuuucaagacuaauagauugcuccuuacgaggagaccccaguacgacuuugucuuc

SEQ ID NO: 2170 - RNA, 56 nt, Artificial Sequence
  Description of Artificial Sequence: Synthetic oligonucleotide
cuuucaagacuaauagauugcuccuuacgaggagacgucuucucuguccccugcca

SEQ ID NO: 2171 - RNA, 56 nt, Artificial Sequence
  Description of Artificial Sequence: Synthetic oligonucleotide
cuuucaagacuaauagauugcuccuuacgaggagacucuucucuguccccugccau

SEQ ID NO: 2172 - RNA, 56 nt, Artificial Sequence
  Description of Artificial Sequence: Synthetic oligonucleotide
cuuucaagacuaauagauugcuccuuacgaggagacucuguccccugccauugcuu

SEQ ID NO: 2173 - RNA, 56 nt, Artificial Sequence
  Description of Artificial Sequence: Synthetic oligonucleotide
cuuucaagacuaauagauugcuccuuacgaggagacaagcaauggcaggggacaga

SEQ ID NO: 2174 - RNA, 56 nt, Artificial Sequence
  Description of Artificial Sequence: Synthetic oligonucleotide
cuuucaagacuaauagauugcuccuuacgaggagaccuugaaccguccgggggaug

SEQ ID NO: 2175 - RNA, 56 nt, Artificial Sequence
  Description of Artificial Sequence: Synthetic oligonucleotide
cuuucaagacuaauagauugcuccuuacgaggagacaaccguccgggggaugccua

SEQ ID NO: 2176 - RNA, 56 nt, Artificial Sequence
  Description of Artificial Sequence: Synthetic oligonucleotide
cuuucaagacuaauagauugcuccuuacgaggagacucccugggcccacagccacu

SEQ ID NO: 2177 - RNA, 56 nt, Artificial Sequence
  Description of Artificial Sequence: Synthetic oligonucleotide
cuuucaagacuaauagauugcuccuuacgaggagacaagauguggcugaaaaccuc

SEQ ID NO: 2178 - RNA, 56 nt, Artificial Sequence
  Description of Artificial Sequence: Synthetic oligonucleotide
cuuucaagacuaauagauugcuccuuacgaggagacucagccacaucuugaagaga

SEQ ID NO: 2179 - RNA, 56 nt, Artificial Sequence
  Description of Artificial Sequence: Synthetic oligonucleotide
cuuucaagacuaauagauugcuccuuacgaggagaccagccacaucuugaagagac

SEQ ID NO: 2180 - RNA, 56 nt, Artificial Sequence
  Description of Artificial Sequence: Synthetic oligonucleotide
cuuucaagacuaauagauugcuccuuacgaggagacagccacaucuugaagagacc

SEQ ID NO: 2181 - RNA, 56 nt, Artificial Sequence
  Description of Artificial Sequence: Synthetic oligonucleotide
cuuucaagacuaauagauugcuccuuacgaggagacaagagaccugaccgcguucu

SEQ ID NO: 2182 - RNA, 56 nt, Artificial Sequence
  Description of Artificial Sequence: Synthetic oligonucleotide
cuuucaagacuaauagauugcuccuuacgaggagacugcucauccuagacggcuuc

SEQ ID NO: 2183 - RNA, 56 nt, Artificial Sequence
  Description of Artificial Sequence: Synthetic oligonucleotide
cuuucaagacuaauagauugcuccuuacgaggagaccagcuccucgaagccgucua

SEQ ID NO: 2184 - RNA, 56 nt, Artificial Sequence
  Description of Artificial Sequence: Synthetic oligonucleotide
cuuucaagacuaauagauugcuccuuacgaggagaccgcuuccagcuccucgaagc

SEQ ID NO: 2185 - RNA, 56 nt, Artificial Sequence
  Description of Artificial Sequence: Synthetic oligonucleotide
cuuucaagacuaauagauugcuccuuacgaggagacgaggagcuggaagcgcaaga

SEQ ID NO: 2186 - RNA, 56 nt, Artificial Sequence
  Description of Artificial Sequence: Synthetic oligonucleotide
cuuucaagacuaauagauugcuccuuacgaggagaccugcacagcacgugcggacc

SEQ ID NO: 2187 - RNA, 56 nt, Artificial Sequence
  Description of Artificial Sequence: Synthetic oligonucleotide
cuuucaagacuaauagauugcuccuuacgaggagacuggaaaaggccggccagcag

SEQ ID NO: 2188 - RNA, 56 nt, Artificial Sequence
  Description of Artificial Sequence: Synthetic oligonucleotide
cuuucaagacuaauagauugcuccuuacgaggagacuucuggaaaaggccggccag

SEQ ID NO: 2189 - RNA, 56 nt, Artificial Sequence
  Description of Artificial Sequence: Synthetic oligonucleotide
cuuucaagacuaauagauugcuccuuacgaggagacuccagaagaagcugcuccga

SEQ ID NO: 2190 - RNA, 56 nt, Artificial Sequence
  Description of Artificial Sequence: Synthetic oligonucleotide
cuuucaagacuaauagauugcuccuuacgaggagacccagaagaagcugcuccgag

SEQ ID NO: 2191 - RNA, 56 nt, Artificial Sequence
  Description of Artificial Sequence: Synthetic oligonucleotide
cuuucaagacuaauagauugcuccuuacgaggagaccagaagaagcugcuccgagg

SEQ ID NO: 2192 - RNA, 56 nt, Artificial Sequence
  Description of Artificial Sequence: Synthetic oligonucleotide
cuuucaagacuaauagauugcuccuuacgaggagaccacccuccuccucacagccc

SEQ ID NO: 2193 - RNA, 56 nt, Artificial Sequence
  Description of Artificial Sequence: Synthetic oligonucleotide
cuuucaagacuaauagauugcuccuuacgaggagaccucaggcucuggaccaggcg

SEQ ID NO: 2194 - RNA, 56 nt, Artificial Sequence
  Description of Artificial Sequence: Synthetic oligonucleotide
cuuucaagacuaauagauugcuccuuacgaggagacgagcuguccggcuucuccau

SEQ ID NO: 2195 - RNA, 56 nt, Artificial Sequence
  Description of Artificial Sequence: Synthetic oligonucleotide
cuuucaagacuaauagauugcuccuuacgaggagacagcuguccggcuucuccaug

SEQ ID NO: 2196 - RNA, 56 nt, Artificial Sequence
  Description of Artificial Sequence: Synthetic oligonucleotide
cuuucaagacuaauagauugcuccuuacgaggagacuccauggagcaggcccaggc

SEQ ID NO: 2197 - RNA, 56 nt, Artificial Sequence
  Description of Artificial Sequence: Synthetic oligonucleotide
cuuucaagacuaauagauugcuccuuacgaggagacgagagcucagggaugacaga

SEQ ID NO: 2198 - RNA, 56 nt, Artificial Sequence
  Description of Artificial Sequence: Synthetic oligonucleotide
cuuucaagacuaauagauugcuccuuacgaggagacagagcucagggaugacagag

SEQ ID NO: 2199 - RNA, 56 nt, Artificial Sequence
  Description of Artificial Sequence: Synthetic oligonucleotide
cuuucaagacuaauagauugcuccuuacgaggagacgugcucugucaucccugagc

SEQ ID NO: 2200 - RNA, 56 nt, Artificial Sequence
  Description of Artificial Sequence: Synthetic oligonucleotide
cuuucaagacuaauagauugcuccuuacgaggagacuucucagucacagccacagc

SEQ ID NO: 2201 - RNA, 56 nt, Artificial Sequence
  Description of Artificial Sequence: Synthetic oligonucleotide
cuuucaagacuaauagauugcuccuuacgaggagacucagucacagccacagcccu

SEQ ID NO: 2202 - RNA, 56 nt, Artificial Sequence
  Description of Artificial Sequence: Synthetic oligonucleotide
cuuucaagacuaauagauugcuccuuacgaggagacgugccgggcagugugccagc

SEQ ID NO: 2203 - RNA, 56 nt, Artificial Sequence
  Description of Artificial Sequence: Synthetic oligonucleotide
cuuucaagacuaauagauugcuccuuacgaggagacugccgggcagugugccagcu

SEQ ID NO: 2204 - RNA, 56 nt, Artificial Sequence
  Description of Artificial Sequence: Synthetic oligonucleotide
cuuucaagacuaauagauugcuccuuacgaggagacgcguccuccccaagcuccag

SEQ ID NO: 2205 - RNA, 56 nt, Artificial Sequence
  Description of Artificial Sequence: Synthetic oligonucleotide
cuuucaagacuaauagauugcuccuuacgaggagacgggaggacgccaagcugccc

SEQ ID NO: 2206 - RNA, 56 nt, Artificial Sequence
  Description of Artificial Sequence: Synthetic oligonucleotide
cuuucaagacuaauagauugcuccuuacgaggagacgccagcucugccagggcccc

SEQ ID NO: 2207 - RNA, 56 nt, Artificial Sequence
  Description of Artificial Sequence: Synthetic oligonucleotide
cuuucaagacuaauagauugcuccuuacgaggagacaugucugcggcccagcuccc

SEQ ID NO: 2208 - RNA, 56 nt, Artificial Sequence
  Description of Artificial Sequence: Synthetic oligonucleotide
cuuucaagacuaauagauugcuccuuacgaggagacgaugucugcggcccagcucc

SEQ ID NO: 2209 - RNA, 56 nt, Artificial Sequence
  Description of Artificial Sequence: Synthetic oligonucleotide
cuuucaagacuaauagauugcuccuuacgaggagacccauccgcagacgugaggac

SEQ ID NO: 2210 - RNA, 56 nt, Artificial Sequence
  Description of Artificial Sequence: Synthetic oligonucleotide
cuuucaagacuaauagauugcuccuuacgaggagacgccaucgcccagguccucac

SEQ ID NO: 2211 - RNA, 56 nt, Artificial Sequence
  Description of Artificial Sequence: Synthetic oligonucleotide
cuuucaagacuaauagauugcuccuuacgaggagacggccaucgcccagguccuca

SEQ ID NO: 2212 - RNA, 56 nt, Artificial Sequence
  Description of Artificial Sequence: Synthetic oligonucleotide
cuuucaagacuaauagauugcuccuuacgaggagacgacuaagccuuuggccaucg

SEQ ID NO: 2213 - RNA, 56 nt, Artificial Sequence
  Description of Artificial Sequence: Synthetic oligonucleotide
cuuucaagacuaauagauugcuccuuacgaggagacguccaacacccaccgcgggc

SEQ ID NO: 2214 - RNA, 56 nt, Artificial Sequence
  Description of Artificial Sequence: Synthetic oligonucleotide
cuuucaagacuaauagauugcuccuuacgaggagaccaggaggaagcuggggaagg

SEQ ID NO: 2215 - RNA, 56 nt, Artificial Sequence
  Description of Artificial Sequence: Synthetic oligonucleotide
cuuucaagacuaauagauugcuccuuacgaggagaccccagcuuccuccugcaaug

SEQ ID NO: 2216 - RNA, 56 nt, Artificial Sequence
  Description of Artificial Sequence: Synthetic oligonucleotide
cuuucaagacuaauagauugcuccuuacgaggagaccuccugcaaugcuuccuggg

SEQ ID NO: 2217 - RNA, 56 nt, Artificial Sequence
  Description of Artificial Sequence: Synthetic oligonucleotide
cuuucaagacuaauagauugcuccuuacgaggagaccugggggcccuguggcuggc

SEQ ID NO: 2218 - RNA, 56 nt, Artificial Sequence
  Description of Artificial Sequence: Synthetic oligonucleotide
cuuucaagacuaauagauugcuccuuacgaggagacgccacucagagccagccaca

SEQ ID NO: 2219 - RNA, 56 nt, Artificial Sequence
  Description of Artificial Sequence: Synthetic oligonucleotide
cuuucaagacuaauagauugcuccuuacgaggagaccgccacucagagccagccac

SEQ ID NO: 2220 - RNA, 56 nt, Artificial Sequence
  Description of Artificial Sequence: Synthetic oligonucleotide
cuuucaagacuaauagauugcuccuuacgaggagacauuucgccacucagagccag

SEQ ID NO: 2221 - RNA, 56 nt, Artificial Sequence
  Description of Artificial Sequence: Synthetic oligonucleotide
cuuucaagacuaauagauugcuccuuacgaggagacuccuugauuucgccacucag

SEQ ID NO: 2222 - RNA, 56 nt, Artificial Sequence
  Description of Artificial Sequence: Synthetic oligonucleotide
cuuucaagacuaauagauugcuccuuacgaggagacgggucaaugcuagguacugc

SEQ ID NO: 2223 - RNA, 56 nt, Artificial Sequence
  Description of Artificial Sequence: Synthetic oligonucleotide
cuuucaagacuaauagauugcuccuuacgaggagaccuuggggucaaugcuaggua

SEQ ID NO: 2224 - RNA, 56 nt, Artificial Sequence
  Description of Artificial Sequence: Synthetic oligonucleotide
cuuucaagacuaauagauugcuccuuacgaggagacuuccuuggggucaaugcuag

SEQ ID NO: 2225 - RNA, 56 nt, Artificial Sequence
  Description of Artificial Sequence: Synthetic oligonucleotide
cuuucaagacuaauagauugcuccuuacgaggagacaccccaaggaagaagaggcc

SEQ ID NO: 2226 - RNA, 56 nt, Artificial Sequence
  Description of Artificial Sequence: Synthetic oligonucleotide
cuuucaagacuaauagauugcuccuuacgaggagacucauagggccucuucuuccu

SEQ ID NO: 2227 - RNA, 56 nt, Artificial Sequence
  Description of Artificial Sequence: Synthetic oligonucleotide
cuuucaagacuaauagauugcuccuuacgaggagaccuggcugggcugaucuucca

SEQ ID NO: 2228 - RNA, 56 nt, Artificial Sequence
  Description of Artificial Sequence: Synthetic oligonucleotide
cuuucaagacuaauagauugcuccuuacgaggagacuggcugggcugaucuuccag

SEQ ID NO: 2229 - RNA, 56 nt, Artificial Sequence
  Description of Artificial Sequence: Synthetic oligonucleotide
cuuucaagacuaauagauugcuccuuacgaggagaccagccucccgcccgcugccu

SEQ ID NO: 2230 - RNA, 56 nt, Artificial Sequence
  Description of Artificial Sequence: Synthetic oligonucleotide
cuuucaagacuaauagauugcuccuuacgaggagaccuguccaccgaggcagccgc

SEQ ID NO: 2231 - RNA, 56 nt, Artificial Sequence
  Description of Artificial Sequence: Synthetic oligonucleotide
cuuucaagacuaauagauugcuccuuacgaggagacugcuuccuguccaccgaggc

SEQ ID NO: 2232 - RNA, 56 nt, Artificial Sequence
  Description of Artificial Sequence: Synthetic oligonucleotide
cuuucaagacuaauagauugcuccuuacgaggagacagguaccucgcaagcaccuu

SEQ ID NO: 2233 - RNA, 56 nt, Artificial Sequence
  Description of Artificial Sequence: Synthetic oligonucleotide
cuuucaagacuaauagauugcuccuuacgaggagaccgagguaccugaagcggcug

SEQ ID NO: 2234 - RNA, 56 nt, Artificial Sequence
  Description of Artificial Sequence: Synthetic oligonucleotide
cuuucaagacuaauagauugcuccuuacgaggagaccagccuccucggccucgugg

SEQ ID NO: 2235 - RNA, 56 nt, Artificial Sequence
  Description of Artificial Sequence: Synthetic oligonucleotide
cuuucaagacuaauagauugcuccuuacgaggagacggcagcacgugguacaggag

SEQ ID NO: 2236 - RNA, 56 nt, Artificial Sequence
  Description of Artificial Sequence: Synthetic oligonucleotide
cuuucaagacuaauagauugcuccuuacgaggagacgcagcacgugguacaggagc

SEQ ID NO: 2237 - RNA, 56 nt, Artificial Sequence
  Description of Artificial Sequence: Synthetic oligonucleotide
cuuucaagacuaauagauugcuccuuacgaggagacucugggcacccgccucacgc

SEQ ID NO: 2238 - RNA, 56 nt, Artificial Sequence
  Description of Artificial Sequence: Synthetic oligonucleotide
cuuucaagacuaauagauugcuccuuacgaggagaccugggcacccgccucacgcc

SEQ ID NO: 2239 - RNA, 56 nt, Artificial Sequence
  Description of Artificial Sequence: Synthetic oligonucleotide
cuuucaagacuaauagauugcuccuuacgaggagacugggcacccgccucacgccu

SEQ ID NO: 2240 - RNA, 56 nt, Artificial Sequence
  Description of Artificial Sequence: Synthetic oligonucleotide
cuuucaagacuaauagauugcuccuuacgaggagaccccaguacaugugcaucagg

SEQ ID NO: 2241 - RNA, 56 nt, Artificial Sequence
  Description of Artificial Sequence: Synthetic oligonucleotide
cuuucaagacuaauagauugcuccuuacgaggagacgcccgccgccuccaaggccu

SEQ ID NO: 2242 - RNA, 56 nt, Artificial Sequence
  Description of Artificial Sequence: Synthetic oligonucleotide
cuuucaagacuaauagauugcuccuuacgaggagacgaggcggcgggccaagacuu

SEQ ID NO: 2243 - RNA, 56 nt, Artificial Sequence
  Description of Artificial Sequence: Synthetic oligonucleotide
cuuucaagacuaauagauugcuccuuacgaggagacucccuggaccuccgcagcac

SEQ ID NO: 2244 - RNA, 56 nt, Artificial Sequence
  Description of Artificial Sequence: Synthetic oligonucleotide
cuuucaagacuaauagauugcuccuuacgaggagacgccccucuggauuggggagc

SEQ ID NO: 2245 - RNA, 56 nt, Artificial Sequence
  Description of Artificial Sequence: Synthetic oligonucleotide
cuuucaagacuaauagauugcuccuuacgaggagacccccucuggauuggggagcc

SEQ ID NO: 2246 - RNA, 56 nt, Artificial Sequence
  Description of Artificial Sequence: Synthetic oligonucleotide
cuuucaagacuaauagauugcuccuuacgaggagacgggagccucgugggacucag

SEQ ID NO: 2247 - RNA, 56 nt, Artificial Sequence
  Description of Artificial Sequence: Synthetic oligonucleotide
cuuucaagacuaauagauugcuccuuacgaggagacgucuccccaugcugcugcag

SEQ ID NO: 2248 - RNA, 56 nt, Artificial Sequence
  Description of Artificial Sequence: Synthetic oligonucleotide
cuuucaagacuaauagauugcuccuuacgaggagacuccucugcugccugaaguag

SEQ ID NO: 2249 - RNA, 56 nt, Artificial Sequence
  Description of Artificial Sequence: Synthetic oligonucleotide
cuuucaagacuaauagauugcuccuuacgaggagacaggcagcagaggagaaguuc

SEQ ID NO: 2250 - RNA, 56 nt, Artificial Sequence
  Description of Artificial Sequence: Synthetic oligonucleotide
cuuucaagacuaauagauugcuccuuacgaggagacaaaggcucgauggugaacuu

SEQ ID NO: 2251 - RNA, 56 nt, Artificial Sequence
  Description of Artificial Sequence: Synthetic oligonucleotide
cuuucaagacuaauagauugcuccuuacgaggagacgaaaggcucgauggugaacu

SEQ ID NO: 2252 - RNA, 56 nt, Artificial Sequence
  Description of Artificial Sequence: Synthetic oligonucleotide
cuuucaagacuaauagauugcuccuuacgaggagacaccaucgagccuuucaaagc

SEQ ID NO: 2253 - RNA, 56 nt, Artificial Sequence
  Description of Artificial Sequence: Synthetic oligonucleotide
cuuucaagacuaauagauugcuccuuacgaggagacgcuuugaaaggcucgauggu

SEQ ID NO: 2254 - RNA, 56 nt, Artificial Sequence
  Description of Artificial Sequence: Synthetic oligonucleotide
cuuucaagacuaauagauugcuccuuacgaggagacagggacuuggcuuugaaagg

SEQ ID NO: 2255 - RNA, 56 nt, Artificial Sequence
  Description of Artificial Sequence: Synthetic oligonucleotide
cuuucaagacuaauagauugcuccuuacgaggagaccaaagccaagucccugaagg

SEQ ID NO: 2256 - RNA, 56 nt, Artificial Sequence
  Description of Artificial Sequence: Synthetic oligonucleotide
cuuucaagacuaauagauugcuccuuacgaggagacaaagccaagucccugaagga

SEQ ID NO: 2257 - RNA, 56 nt, Artificial Sequence
  Description of Artificial Sequence: Synthetic oligonucleotide
cuuucaagacuaauagauugcuccuuacgaggagaccacauccuucagggacuugg

SEQ ID NO: 2258 - RNA, 56 nt, Artificial Sequence
  Description of Artificial Sequence: Synthetic oligonucleotide
cuuucaagacuaauagauugcuccuuacgaggagacccaggucuuccacauccuuc

SEQ ID NO: 2259 - RNA, 56 nt, Artificial Sequence
  Description of Artificial Sequence: Synthetic oligonucleotide
cuuucaagacuaauagauugcuccuuacgaggagaccccaggucuuccacauccuu

SEQ ID NO: 2260 - RNA, 56 nt, Artificial Sequence
  Description of Artificial Sequence: Synthetic oligonucleotide
cuuucaagacuaauagauugcuccuuacgaggagaccucggaagacacagcugggg

SEQ ID NO: 2261 - RNA, 56 nt, Artificial Sequence
  Description of Artificial Sequence: Synthetic oligonucleotide
cuuucaagacuaauagauugcuccuuacgaggagacggucccgaacagcagggagc

SEQ ID NO: 2262 - RNA, 56 nt, Artificial Sequence
  Description of Artificial Sequence: Synthetic oligonucleotide
cuuucaagacuaauagauugcuccuuacgaggagacaggucccgaacagcagggag

SEQ ID NO: 2263 - RNA, 56 nt, Artificial Sequence
  Description of Artificial Sequence: Synthetic oligonucleotide
cuuucaagacuaauagauugcuccuuacgaggagacuuuaggucccgaacagcagg

SEQ ID NO: 2264 - RNA, 56 nt, Artificial Sequence
  Description of Artificial Sequence: Synthetic oligonucleotide
cuuucaagacuaauagauugcuccuuacgaggagaccuuuaggucccgaacagcag

SEQ ID NO: 2265 - RNA, 56 nt, Artificial Sequence
  Description of Artificial Sequence: Synthetic oligonucleotide
cuuucaagacuaauagauugcuccuuacgaggagacgggaccuaaagaaacuggag

SEQ ID NO: 2266 - RNA, 56 nt, Artificial Sequence
  Description of Artificial Sequence: Synthetic oligonucleotide
cuuucaagacuaauagauugcuccuuacgaggagacgggaaagccugggggccuga

SEQ ID NO: 2267 - RNA, 56 nt, Artificial Sequence
  Description of Artificial Sequence: Synthetic oligonucleotide
cuuucaagacuaauagauugcuccuuacgaggagacggggaaagccugggggccug

SEQ ID NO: 2268 - RNA, 56 nt, Artificial Sequence
  Description of Artificial Sequence: Synthetic oligonucleotide
cuuucaagacuaauagauugcuccuuacgaggagacccccaaacuggugcggaucc

SEQ ID NO: 2269 - RNA, 56 nt, Artificial Sequence
  Description of Artificial Sequence: Synthetic oligonucleotide
cuuucaagacuaauagauugcuccuuacgaggagaccccaaacuggugcggauccu

SEQ ID NO: 2270 - RNA, 56 nt, Artificial Sequence
  Description of Artificial Sequence: Synthetic oligonucleotide
cuuucaagacuaauagauugcuccuuacgaggagacuucucacucagcgcauccag

SEQ ID NO: 2271 - RNA, 56 nt, Artificial Sequence
  Description of Artificial Sequence: Synthetic oligonucleotide
cuuucaagacuaauagauugcuccuuacgaggagacagcugggggaagguggcuga

SEQ ID NO: 2272 - RNA, 56 nt, Artificial Sequence
  Description of Artificial Sequence: Synthetic oligonucleotide
cuuucaagacuaauagauugcuccuuacgaggagacccccagcugaaguccuugga

SEQ ID NO: 2273 - RNA, 56 nt, Artificial Sequence
  Description of Artificial Sequence: Synthetic oligonucleotide
cuuucaagacuaauagauugcuccuuacgaggagaccaaggacuucagcuggggga

SEQ ID NO: 2274 - RNA, 56 nt, Artificial Sequence
  Description of Artificial Sequence: Synthetic oligonucleotide
cuuucaagacuaauagauugcuccuuacgaggagacccaaggacuucagcuggggg

SEQ ID NO: 2275 - RNA, 56 nt, Artificial Sequence
  Description of Artificial Sequence: Synthetic oligonucleotide
cuuucaagacuaauagauugcuccuuacgaggagacaggguuuccaaggacuucag

SEQ ID NO: 2276 - RNA, 56 nt, Artificial Sequence
  Description of Artificial Sequence: Synthetic oligonucleotide
cuuucaagacuaauagauugcuccuuacgaggagacuaggcacccaggucagugau

SEQ ID NO: 2277 - RNA, 56 nt, Artificial Sequence
  Description of Artificial Sequence: Synthetic oligonucleotide
cuuucaagacuaauagauugcuccuuacgaggagacguaggcacccaggucaguga

SEQ ID NO: 2278 - RNA, 56 nt, Artificial Sequence
  Description of Artificial Sequence: Synthetic oligonucleotide
cuuucaagacuaauagauugcuccuuacgaggagacgcucgcugcaucccugcuca

SEQ ID NO: 2279 - RNA, 56 nt, Artificial Sequence
  Description of Artificial Sequence: Synthetic oligonucleotide
cuuucaagacuaauagauugcuccuuacgaggagacgccugagcagggaugcagcg

SEQ ID NO: 2280 - RNA, 56 nt, Artificial Sequence
  Description of Artificial Sequence: Synthetic oligonucleotide
cuuucaagacuaauagauugcuccuuacgaggagacuacaauaacugcaucugcga

SEQ ID NO: 2281 - RNA, 56 nt, Artificial Sequence
  Description of Artificial Sequence: Synthetic oligonucleotide
cuuucaagacuaauagauugcuccuuacgaggagacgcucgugugcuuccggacau

SEQ ID NO: 2282 - RNA, 56 nt, Artificial Sequence
  Description of Artificial Sequence: Synthetic oligonucleotide
cuuucaagacuaauagauugcuccuuacgaggagaccggacauggugucccuccgg

SEQ ID NO: 2283 - RNA, 56 nt, Artificial Sequence
  Description of Artificial Sequence: Synthetic oligonucleotide
cuuucaagacuaauagauugcuccuuacgaggagacacggcugccggggcccagca

SEQ ID NO: 2284 - RNA, 56 nt, Artificial Sequence
  Description of Artificial Sequence: Synthetic oligonucleotide
cuuucaagacuaauagauugcuccuuacgaggagacggagguguccucauguggag

SEQ ID NO: 2285 - RNA, 56 nt, Artificial Sequence
  Description of Artificial Sequence: Synthetic oligonucleotide
cuuucaagacuaauagauugcuccuuacgaggagaccuggacacugaaugggaugg

SEQ ID NO: 2286 - RNA, 56 nt, Artificial Sequence
  Description of Artificial Sequence: Synthetic oligonucleotide
cuuucaagacuaauagauugcuccuuacgaggagacaguguccaggaacaccugca

SEQ ID NO: 2287 - RNA, 56 nt, Artificial Sequence
  Description of Artificial Sequence: Synthetic oligonucleotide
cuuucaagacuaauagauugcuccuuacgaggagaccagguguuccuggacacuga

SEQ ID NO: 2288 - RNA, 56 nt, Artificial Sequence
  Description of Artificial Sequence: Synthetic oligonucleotide
cuuucaagacuaauagauugcuccuuacgaggagacuugcagguguuccuggacac

SEQ ID NO: 2289 - RNA, 56 nt, Artificial Sequence
  Description of Artificial Sequence: Synthetic oligonucleotide
cuuucaagacuaauagauugcuccuuacgaggagacacggaucagccugagaugau

SEQ ID NO: 2290 - RNA, 37 nt, Artificial Sequence
  Description of Artificial Sequence: Synthetic oligonucleotide
auugcuccuuacgaggagacagcaggcuguuguguga

SEQ ID NO: 2291 - RNA, 37 nt, Artificial Sequence
  Description of Artificial Sequence: Synthetic oligonucleotide
auugcuccuuacgaggagaccaugucacacaacagcc

SEQ ID NO: 2292 - RNA, 37 nt, Artificial Sequence
  Description of Artificial Sequence: Synthetic oligonucleotide
auugcuccuuacgaggagacugugacauggaagguga

SEQ ID NO: 2293 - RNA, 37 nt, Artificial Sequence
  Description of Artificial Sequence: Synthetic oligonucleotide
auugcuccuuacgaggagacaucaccuuccaugucac

SEQ ID NO: 2294 - RNA, 37 nt, Artificial Sequence
  Description of Artificial Sequence: Synthetic oligonucleotide
auugcuccuuacgaggagacgcauaagccucccuggu

SEQ ID NO: 2295 - RNA, 37 nt, Artificial Sequence
  Description of Artificial Sequence: Synthetic oligonucleotide
auugcuccuuacgaggagaccaggacucccagcugga

SEQ ID NO: 2296 - RNA, 37 nt, Artificial Sequence
  Description of Artificial Sequence: Synthetic oligonucleotide
auugcuccuuacgaggagaccucaggcccuccagcug

SEQ ID NO: 2297 - RNA, 37 nt, Artificial Sequence
  Description of Artificial Sequence: Synthetic oligonucleotide
auugcuccuuacgaggagacugcuggcaucuccauac

SEQ ID NO: 2298 - RNA, 37 nt, Artificial Sequence
  Description of Artificial Sequence: Synthetic oligonucleotide
auugcuccuuacgaggagacugcccaacuucugcugg

SEQ ID NO: 2299 - RNA, 37 nt, Artificial Sequence
  Description of Artificial Sequence: Synthetic oligonucleotide
auugcuccuuacgaggagaccugcccaacuucugcug

SEQ ID NO: 2300 - RNA, 37 nt, Artificial Sequence
  Description of Artificial Sequence: Synthetic oligonucleotide
auugcuccuuacgaggagacucugcccaacuucugcu

SEQ ID NO: 2301 - RNA, 37 nt, Artificial Sequence
  Description of Artificial Sequence: Synthetic oligonucleotide
auugcuccuuacgaggagacugacuuuucugcccaac

SEQ ID NO: 2302 - RNA, 37 nt, Artificial Sequence
  Description of Artificial Sequence: Synthetic oligonucleotide
auugcuccuuacgaggagaccugacuuuucugcccaa

SEQ ID NO: 2303 - RNA, 37 nt, Artificial Sequence
  Description of Artificial Sequence: Synthetic oligonucleotide
auugcuccuuacgaggagacucugacuuuucugccca

SEQ ID NO: 2304 - RNA, 37 nt, Artificial Sequence
  Description of Artificial Sequence: Synthetic oligonucleotide
auugcuccuuacgaggagacccagaggagcuuccggc

SEQ ID NO: 2305 - RNA, 37 nt, Artificial Sequence
  Description of Artificial Sequence: Synthetic oligonucleotide
auugcuccuuacgaggagacaggucugccggaagcuc

SEQ ID NO: 2306 - RNA, 37 nt, Artificial Sequence
  Description of Artificial Sequence: Synthetic oligonucleotide
auugcuccuuacgaggagaccggcagaccugaagcac

SEQ ID NO: 2307 - RNA, 37 nt, Artificial Sequence
  Description of Artificial Sequence: Synthetic oligonucleotide
auugcuccuuacgaggagaccagugcuucaggucugc

SEQ ID NO: 2308 - RNA, 37 nt, Artificial Sequence
  Description of Artificial Sequence: Synthetic oligonucleotide
auugcuccuuacgaggagacaacagcgcaggcagugg

SEQ ID NO: 2309 - RNA, 37 nt, Artificial Sequence
  Description of Artificial Sequence: Synthetic oligonucleotide
auugcuccuuacgaggagacaaccaggagccagccuc

SEQ ID NO: 2310 - RNA, 37 nt, Artificial Sequence
  Description of Artificial Sequence: Synthetic oligonucleotide
auugcuccuuacgaggagacuccaggcgcaucuggcc

SEQ ID NO: 2311 - RNA, 37 nt, Artificial Sequence
  Description of Artificial Sequence: Synthetic oligonucleotide
auugcuccuuacgaggagaccuccaggcgcaucuggc

SEQ ID NO: 2312 - RNA, 37 nt, Artificial Sequence
  Description of Artificial Sequence: Synthetic oligonucleotide
auugcuccuuacgaggagacucuccaggcgcaucugg

SEQ ID NO: 2313 - RNA, 37 nt, Artificial Sequence
  Description of Artificial Sequence: Synthetic oligonucleotide
auugcuccuuacgaggagaccuccaguuccucguuga

SEQ ID NO: 2314 - RNA, 37 nt, Artificial Sequence
  Description of Artificial Sequence: Synthetic oligonucleotide
auugcuccuuacgaggagacuccaguuccucguugag

SEQ ID NO: 2315 - RNA, 37 nt, Artificial Sequence
  Description of Artificial Sequence: Synthetic oligonucleotide
auugcuccuuacgaggagacaggcagcucaacgagga

SEQ ID NO: 2316 - RNA, 37 nt, Artificial Sequence
  Description of Artificial Sequence: Synthetic oligonucleotide
auugcuccuuacgaggagaccucguugagcugccuga

SEQ ID NO: 2317 - RNA, 37 nt, Artificial Sequence
  Description of Artificial Sequence: Synthetic oligonucleotide
auugcuccuuacgaggagacagcugccugaaucuccc

SEQ ID NO: 2318 - RNA, 37 nt, Artificial Sequence
  Description of Artificial Sequence: Synthetic oligonucleotide
auugcuccuuacgaggagacguccccaccaucuccac

SEQ ID NO: 2319 - RNA, 37 nt, Artificial Sequence
  Description of Artificial Sequence: Synthetic oligonucleotide
auugcuccuuacgaggagacuccccaccaucuccacu

SEQ ID NO: 2320 - RNA, 37 nt, Artificial Sequence
  Description of Artificial Sequence: Synthetic oligonucleotide
auugcuccuuacgaggagacccagagcccauggggca

SEQ ID NO: 2321 - RNA, 37 nt, Artificial Sequence
  Description of Artificial Sequence: Synthetic oligonucleotide
auugcuccuuacgaggagacgccagagcccauggggc

SEQ ID NO: 2322 - RNA, 37 nt, Artificial Sequence
  Description of Artificial Sequence: Synthetic oligonucleotide
auugcuccuuacgaggagaccagccucagagauuugc

SEQ ID NO: 2323 - RNA, 37 nt, Artificial Sequence
  Description of Artificial Sequence: Synthetic oligonucleotide
auugcuccuuacgaggagacggaggccguggacagug

SEQ ID NO: 2324 - RNA, 37 nt, Artificial Sequence
  Description of Artificial Sequence: Synthetic oligonucleotide
auugcuccuuacgaggagacacuguccacggccuccc

SEQ ID NO: 2325 - RNA, 37 nt, Artificial Sequence
  Description of Artificial Sequence: Synthetic oligonucleotide
auugcuccuuacgaggagacgcuccaucagccacuga

SEQ ID NO: 2326 - RNA, 37 nt, Artificial Sequence
  Description of Artificial Sequence: Synthetic oligonucleotide
auugcuccuuacgaggagacaggcaugcugggcaggu

SEQ ID NO: 2327 - RNA, 37 nt, Artificial Sequence
  Description of Artificial Sequence: Synthetic oligonucleotide
auugcuccuuacgaggagaccucgggaggucagggca

SEQ ID NO: 2328 - RNA, 37 nt, Artificial Sequence
  Description of Artificial Sequence: Synthetic oligonucleotide
auugcuccuuacgaggagacgcucgggaggucagggc

SEQ ID NO: 2329 - RNA, 37 nt, Artificial Sequence
  Description of Artificial Sequence: Synthetic oligonucleotide
auugcuccuuacgaggagacgagaccucuccagcugc

SEQ ID NO: 2330 - RNA, 37 nt, Artificial Sequence
  Description of Artificial Sequence: Synthetic oligonucleotide
auugcuccuuacgaggagacuuggagaccucuccagc

SEQ ID NO: 2331 - RNA, 37 nt, Artificial Sequence
  Description of Artificial Sequence: Synthetic oligonucleotide
auugcuccuuacgaggagacgaagcuuguuggagacc

SEQ ID NO: 2332 - RNA, 37 nt, Artificial Sequence
  Description of Artificial Sequence: Synthetic oligonucleotide
auugcuccuuacgaggagacggaagcuuguuggagac

SEQ ID NO: 2333 - RNA, 37 nt, Artificial Sequence
  Description of Artificial Sequence: Synthetic oligonucleotide
auugcuccuuacgaggagacuggaagcuuguuggaga

SEQ ID NO: 2334 - RNA, 37 nt, Artificial Sequence
  Description of Artificial Sequence: Synthetic oligonucleotide
auugcuccuuacgaggagacuaccgcucacugcagga

SEQ ID NO: 2335 - RNA, 37 nt, Artificial Sequence
  Description of Artificial Sequence: Synthetic oligonucleotide
auugcuccuuacgaggagaccugcugcuccucuccag

SEQ ID NO: 2336 - RNA, 37 nt, Artificial Sequence
  Description of Artificial Sequence: Synthetic oligonucleotide
auugcuccuuacgaggagacccgcuccaggcucuugc

SEQ ID NO: 2337 - RNA, 37 nt, Artificial Sequence
  Description of Artificial Sequence: Synthetic oligonucleotide
auugcuccuuacgaggagacugcccaguccggggugg

SEQ ID NO: 2338 - RNA, 37 nt, Artificial Sequence
  Description of Artificial Sequence: Synthetic oligonucleotide
auugcuccuuacgaggagacggccagcugccguucug

SEQ ID NO: 2339 - RNA, 37 nt, Artificial Sequence
  Description of Artificial Sequence: Synthetic oligonucleotide
auugcuccuuacgaggagacgcagccaacagcaccuc

SEQ ID NO: 2340 - RNA, 37 nt, Artificial Sequence
  Description of Artificial Sequence: Synthetic oligonucleotide
auugcuccuuacgaggagacgcugccaaggagcaccg

SEQ ID NO: 2341 - RNA, 37 nt, Artificial Sequence
  Description of Artificial Sequence: Synthetic oligonucleotide
auugcuccuuacgaggagaccccagcacagcaaucac

SEQ ID NO: 2342 - RNA, 37 nt, Artificial Sequence
  Description of Artificial Sequence: Synthetic oligonucleotide
auugcuccuuacgaggagacgcccagcacagcaauca

SEQ ID NO: 2343 - RNA, 37 nt, Artificial Sequence
  Description of Artificial Sequence: Synthetic oligonucleotide
auugcuccuuacgaggagaccugugcugggcaaagcu

SEQ ID NO: 2344 - RNA, 37 nt, Artificial Sequence
  Description of Artificial Sequence: Synthetic oligonucleotide
auugcuccuuacgaggagaccccugaccagcuuugcc

SEQ ID NO: 2345 - RNA, 37 nt, Artificial Sequence
  Description of Artificial Sequence: Synthetic oligonucleotide
auugcuccuuacgaggagacggcuggggcagugagcc

SEQ ID NO: 2346 - RNA, 37 nt, Artificial Sequence
  Description of Artificial Sequence: Synthetic oligonucleotide
auugcuccuuacgaggagacuggccggcuuccccagu

SEQ ID NO: 2347 - RNA, 37 nt, Artificial Sequence
  Description of Artificial Sequence: Synthetic oligonucleotide
auugcuccuuacgaggagaccccaguacgacuuuguc

SEQ ID NO: 2348 - RNA, 37 nt, Artificial Sequence
  Description of Artificial Sequence: Synthetic oligonucleotide
auugcuccuuacgaggagacgucuucucuguccccug

SEQ ID NO: 2349 - RNA, 37 nt, Artificial Sequence
  Description of Artificial Sequence: Synthetic oligonucleotide
auugcuccuuacgaggagacucuucucuguccccugc

SEQ ID NO: 2350 - RNA, 37 nt, Artificial Sequence
  Description of Artificial Sequence: Synthetic oligonucleotide
auugcuccuuacgaggagacucuguccccugccauug

SEQ ID NO: 2351 - RNA, 37 nt, Artificial Sequence
  Description of Artificial Sequence: Synthetic oligonucleotide
auugcuccuuacgaggagacaagcaauggcaggggac

SEQ ID NO: 2352 - RNA, 37 nt, Artificial Sequence
  Description of Artificial Sequence: Synthetic oligonucleotide
auugcuccuuacgaggagaccuugaaccguccggggg

SEQ ID NO: 2353 - RNA, 37 nt, Artificial Sequence
  Description of Artificial Sequence: Synthetic oligonucleotide
auugcuccuuacgaggagacaaccguccgggggaugc

SEQ ID NO: 2354 - RNA, 37 nt, Artificial Sequence
  Description of Artificial Sequence: Synthetic oligonucleotide
auugcuccuuacgaggagacucccugggcccacagcc

SEQ ID NO: 2355 - RNA, 37 nt, Artificial Sequence
  Description of Artificial Sequence: Synthetic oligonucleotide
auugcuccuuacgaggagacaagauguggcugaaaac

SEQ ID NO: 2356 - RNA, 37 nt, Artificial Sequence
  Description of Artificial Sequence: Synthetic oligonucleotide
auugcuccuuacgaggagacucagccacaucuugaag

SEQ ID NO: 2357 - RNA, 37 nt, Artificial Sequence
  Description of Artificial Sequence: Synthetic oligonucleotide
auugcuccuuacgaggagaccagccacaucuugaaga

SEQ ID NO: 2358 - RNA, 37 nt, Artificial Sequence
  Description of Artificial Sequence: Synthetic oligonucleotide
auugcuccuuacgaggagacagccacaucuugaagag

SEQ ID NO: 2359 - RNA, 37 nt, Artificial Sequence
  Description of Artificial Sequence: Synthetic oligonucleotide
auugcuccuuacgaggagacaagagaccugaccgcgu

SEQ ID NO: 2360 - RNA, 37 nt, Artificial Sequence
  Description of Artificial Sequence: Synthetic oligonucleotide
auugcuccuuacgaggagacugcucauccuagacggc

SEQ ID NO: 2361 - RNA, 37 nt, Artificial Sequence
  Description of Artificial Sequence: Synthetic oligonucleotide
auugcuccuuacgaggagaccagcuccucgaagccgu

SEQ ID NO: 2362 - RNA, 37 nt, Artificial Sequence
  Description of Artificial Sequence: Synthetic oligonucleotide
auugcuccuuacgaggagaccgcuuccagcuccucga

SEQ ID NO: 2363 - RNA, 37 nt, Artificial Sequence
  Description of Artificial Sequence: Synthetic oligonucleotide
auugcuccuuacgaggagacgaggagcuggaagcgca

SEQ ID NO: 2364 - RNA, 37 nt, Artificial Sequence
  Description of Artificial Sequence: Synthetic oligonucleotide
auugcuccuuacgaggagaccugcacagcacgugcgg

SEQ ID NO: 2365 - RNA, 37 nt, Artificial Sequence
  Description of Artificial Sequence: Synthetic oligonucleotide
auugcuccuuacgaggagacuggaaaaggccggccag

SEQ ID NO: 2366 - RNA, 37 nt, Artificial Sequence
  Description of Artificial Sequence: Synthetic oligonucleotide
auugcuccuuacgaggagacuucuggaaaaggccggc

SEQ ID NO: 2367 - RNA, 37 nt, Artificial Sequence
  Description of Artificial Sequence: Synthetic oligonucleotide
auugcuccuuacgaggagacuccagaagaagcugcuc

SEQ ID NO: 2368 - RNA, 37 nt, Artificial Sequence
  Description of Artificial Sequence: Synthetic oligonucleotide
auugcuccuuacgaggagacccagaagaagcugcucc

SEQ ID NO: 2369 - RNA, 37 nt, Artificial Sequence
  Description of Artificial Sequence: Synthetic oligonucleotide
auugcuccuuacgaggagaccagaagaagcugcuccg

SEQ ID NO: 2370 - RNA, 37 nt, Artificial Sequence
  Description of Artificial Sequence: Synthetic oligonucleotide
auugcuccuuacgaggagaccacccuccuccucacag

SEQ ID NO: 2371 - RNA, 37 nt, Artificial Sequence
  Description of Artificial Sequence: Synthetic oligonucleotide
auugcuccuuacgaggagaccucaggcucuggaccag

SEQ ID NO: 2372 - RNA, 37 nt, Artificial Sequence
  Description of Artificial Sequence: Synthetic oligonucleotide
auugcuccuuacgaggagacgagcuguccggcuucuc

SEQ ID NO: 2373 - RNA, 37 nt, Artificial Sequence
  Description of Artificial Sequence: Synthetic oligonucleotide
auugcuccuuacgaggagacagcuguccggcuucucc

SEQ ID NO: 2374 - RNA, 37 nt, Artificial Sequence
  Description of Artificial Sequence: Synthetic oligonucleotide
auugcuccuuacgaggagacuccauggagcaggccca

SEQ ID NO: 2375 - RNA, 37 nt, Artificial Sequence
  Description of Artificial Sequence: Synthetic oligonucleotide
auugcuccuuacgaggagacgagagcucagggaugac

SEQ ID NO: 2376 - RNA, 37 nt, Artificial Sequence
  Description of Artificial Sequence: Synthetic oligonucleotide
auugcuccuuacgaggagacagagcucagggaugaca

SEQ ID NO: 2377 - RNA, 37 nt, Artificial Sequence
  Description of Artificial Sequence: Synthetic oligonucleotide
auugcuccuuacgaggagacgugcucugucaucccug

SEQ ID NO: 2378 - RNA, 37 nt, Artificial Sequence
  Description of Artificial Sequence: Synthetic oligonucleotide
auugcuccuuacgaggagacuucucagucacagccac

SEQ ID NO: 2379 - RNA, 37 nt, Artificial Sequence
  Description of Artificial Sequence: Synthetic oligonucleotide
auugcuccuuacgaggagacucagucacagccacagc

SEQ ID NO: 2380 - RNA, 37 nt, Artificial Sequence
  Description of Artificial Sequence: Synthetic oligonucleotide
auugcuccuuacgaggagacgugccgggcagugugcc

SEQ ID NO: 2381 - RNA, 37 nt, Artificial Sequence
  Description of Artificial Sequence: Synthetic oligonucleotide
auugcuccuuacgaggagacugccgggcagugugcca

SEQ ID NO: 2382 - RNA, 37 nt, Artificial Sequence
  Description of Artificial Sequence: Synthetic oligonucleotide
auugcuccuuacgaggagacgcguccuccccaagcuc

SEQ ID NO: 2383 - RNA, 37 nt, Artificial Sequence
  Description of Artificial Sequence: Synthetic oligonucleotide
auugcuccuuacgaggagacgggaggacgccaagcug

SEQ ID NO: 2384 - RNA, 37 nt, Artificial Sequence
  Description of Artificial Sequence: Synthetic oligonucleotide
auugcuccuuacgaggagacgccagcucugccagggc

SEQ ID NO: 2385 - RNA, 37 nt, Artificial Sequence
  Description of Artificial Sequence: Synthetic oligonucleotide
auugcuccuuacgaggagacaugucugcggcccagcu

SEQ ID NO: 2386 - RNA, 37 nt, Artificial Sequence
  Description of Artificial Sequence: Synthetic oligonucleotide
auugcuccuuacgaggagacgaugucugcggcccagc

SEQ ID NO: 2387 - RNA, 37 nt, Artificial Sequence
  Description of Artificial Sequence: Synthetic oligonucleotide
auugcuccuuacgaggagacccauccgcagacgugag

SEQ ID NO: 2388 - RNA, 37 nt, Artificial Sequence
  Description of Artificial Sequence: Synthetic oligonucleotide
auugcuccuuacgaggagacgccaucgcccagguccu

SEQ ID NO: 2389 - RNA, 37 nt, Artificial Sequence
  Description of Artificial Sequence: Synthetic oligonucleotide
auugcuccuuacgaggagacggccaucgcccaggucc

SEQ ID NO: 2390 - RNA, 37 nt, Artificial Sequence
  Description of Artificial Sequence: Synthetic oligonucleotide
auugcuccuuacgaggagacgacuaagccuuuggcca

SEQ ID NO: 2391 - RNA, 37 nt, Artificial Sequence
  Description of Artificial Sequence: Synthetic oligonucleotide
auugcuccuuacgaggagacguccaacacccaccgcg

SEQ ID NO: 2392 - RNA, 37 nt, Artificial Sequence
  Description of Artificial Sequence: Synthetic oligonucleotide
auugcuccuuacgaggagaccaggaggaagcugggga

SEQ ID NO: 2393 - RNA, 37 nt, Artificial Sequence
  Description of Artificial Sequence: Synthetic oligonucleotide
auugcuccuuacgaggagaccccagcuuccuccugca

SEQ ID NO: 2394 - RNA, 37 nt, Artificial Sequence
  Description of Artificial Sequence: Synthetic oligonucleotide
auugcuccuuacgaggagaccuccugcaaugcuuccu

SEQ ID NO: 2395 - RNA, 37 nt, Artificial Sequence
  Description of Artificial Sequence: Synthetic oligonucleotide
auugcuccuuacgaggagaccugggggcccuguggcu

SEQ ID NO: 2396 - RNA, 37 nt, Artificial Sequence
  Description of Artificial Sequence: Synthetic oligonucleotide
auugcuccuuacgaggagacgccacucagagccagcc

SEQ ID NO: 2397 - RNA, 37 nt, Artificial Sequence
  Description of Artificial Sequence: Synthetic oligonucleotide
auugcuccuuacgaggagaccgccacucagagccagc

SEQ ID NO: 2398 - RNA, 37 nt, Artificial Sequence
  Description of Artificial Sequence: Synthetic oligonucleotide
auugcuccuuacgaggagacauuucgccacucagagc

SEQ ID NO: 2399 - RNA, 37 nt, Artificial Sequence
  Description of Artificial Sequence: Synthetic oligonucleotide
auugcuccuuacgaggagacuccuugauuucgccacu

SEQ ID NO: 2400 - RNA, 37 nt, Artificial Sequence
  Description of Artificial Sequence: Synthetic oligonucleotide
auugcuccuuacgaggagacgggucaaugcuagguac

SEQ ID NO: 2401 - RNA, 37 nt, Artificial Sequence
  Description of Artificial Sequence: Synthetic oligonucleotide
auugcuccuuacgaggagaccuuggggucaaugcuag

SEQ ID NO: 2402 - RNA, 37 nt, Artificial Sequence
  Description of Artificial Sequence: Synthetic oligonucleotide
auugcuccuuacgaggagacuuccuuggggucaaugc

SEQ ID NO: 2403 - RNA, 37 nt, Artificial Sequence
  Description of Artificial Sequence: Synthetic oligonucleotide
auugcuccuuacgaggagacaccccaaggaagaagag

SEQ ID NO: 2404 - RNA, 37 nt, Artificial Sequence
  Description of Artificial Sequence: Synthetic oligonucleotide
auugcuccuuacgaggagacucauagggccucuucuu

SEQ ID NO: 2405 - RNA, 37 nt, Artificial Sequence
  Description of Artificial Sequence: Synthetic oligonucleotide
auugcuccuuacgaggagaccuggcugggcugaucuu

SEQ ID NO: 2406 - RNA, 37 nt, Artificial Sequence
  Description of Artificial Sequence: Synthetic oligonucleotide
auugcuccuuacgaggagacuggcugggcugaucuuc

SEQ ID NO: 2407 - RNA, 37 nt, Artificial Sequence
  Description of Artificial Sequence: Synthetic oligonucleotide
auugcuccuuacgaggagaccagccucccgcccgcug

SEQ ID NO: 2408 - RNA, 37 nt, Artificial Sequence
  Description of Artificial Sequence: Synthetic oligonucleotide
auugcuccuuacgaggagaccuguccaccgaggcagc

SEQ ID NO: 2409 - RNA, 37 nt, Artificial Sequence
  Description of Artificial Sequence: Synthetic oligonucleotide
auugcuccuuacgaggagacugcuuccuguccaccga

SEQ ID NO: 2410 - RNA, 37 nt, Artificial Sequence
  Description of Artificial Sequence: Synthetic oligonucleotide
auugcuccuuacgaggagacagguaccucgcaagcac

SEQ ID NO: 2411 - RNA, 37 nt, Artificial Sequence
  Description of Artificial Sequence: Synthetic oligonucleotide
auugcuccuuacgaggagaccgagguaccugaagcgg

SEQ ID NO: 2412 - RNA, 37 nt, Artificial Sequence
  Description of Artificial Sequence: Synthetic oligonucleotide
auugcuccuuacgaggagaccagccuccucggccucg

SEQ ID NO: 2413 - RNA, 37 nt, Artificial Sequence
  Description of Artificial Sequence: Synthetic oligonucleotide
auugcuccuuacgaggagacggcagcacgugguacag

SEQ ID NO: 2414 - RNA, 37 nt, Artificial Sequence
  Description of Artificial Sequence: Synthetic oligonucleotide
auugcuccuuacgaggagacgcagcacgugguacagg

SEQ ID NO: 2415 - RNA, 37 nt, Artificial Sequence
  Description of Artificial Sequence: Synthetic oligonucleotide
auugcuccuuacgaggagacucugggcacccgccuca

SEQ ID NO: 2416 - RNA, 37 nt, Artificial Sequence
  Description of Artificial Sequence: Synthetic oligonucleotide
auugcuccuuacgaggagaccugggcacccgccucac

SEQ ID NO: 2417 - RNA, 37 nt, Artificial Sequence
  Description of Artificial Sequence: Synthetic oligonucleotide
auugcuccuuacgaggagacugggcacccgccucacg

SEQ ID NO: 2418 - RNA, 37 nt, Artificial Sequence
  Description of Artificial Sequence: Synthetic oligonucleotide
auugcuccuuacgaggagaccccaguacaugugcauc

SEQ ID NO: 2419 - RNA, 37 nt, Artificial Sequence
  Description of Artificial Sequence: Synthetic oligonucleotide
auugcuccuuacgaggagacgcccgccgccuccaagg

SEQ ID NO: 2420 - RNA, 37 nt, Artificial Sequence
  Description of Artificial Sequence: Synthetic oligonucleotide
auugcuccuuacgaggagacgaggcggcgggccaaga

SEQ ID NO: 2421 - RNA, 37 nt, Artificial Sequence
  Description of Artificial Sequence: Synthetic oligonucleotide
auugcuccuuacgaggagacucccuggaccuccgcag

SEQ ID NO: 2422 - RNA, 37 nt, Artificial Sequence
  Description of Artificial Sequence: Synthetic oligonucleotide
auugcuccuuacgaggagacgccccucuggauugggg

SEQ ID NO: 2423 - RNA, 37 nt, Artificial Sequence
  Description of Artificial Sequence: Synthetic oligonucleotide
auugcuccuuacgaggagacccccucuggauugggga

SEQ ID NO: 2424 - RNA, 37 nt, Artificial Sequence
  Description of Artificial Sequence: Synthetic oligonucleotide
auugcuccuuacgaggagacgggagccucgugggacu

SEQ ID NO: 2425 - RNA, 37 nt, Artificial Sequence
  Description of Artificial Sequence: Synthetic oligonucleotide
auugcuccuuacgaggagacgucuccccaugcugcug

SEQ ID NO: 2426 - RNA, 37 nt, Artificial Sequence
  Description of Artificial Sequence: Synthetic oligonucleotide
auugcuccuuacgaggagacuccucugcugccugaag

SEQ ID NO: 2427 - RNA, 37 nt, Artificial Sequence
  Description of Artificial Sequence: Synthetic oligonucleotide
auugcuccuuacgaggagacaggcagcagaggagaag

SEQ ID NO: 2428 - RNA, 37 nt, Artificial Sequence
  Description of Artificial Sequence: Synthetic oligonucleotide
auugcuccuuacgaggagacaaaggcucgauggugaa

SEQ ID NO: 2429 - RNA, 37 nt, Artificial Sequence
  Description of Artificial Sequence: Synthetic oligonucleotide
auugcuccuuacgaggagacgaaaggcucgaugguga

SEQ ID NO: 2430 - RNA, 37 nt, Artificial Sequence
  Description of Artificial Sequence: Synthetic oligonucleotide
auugcuccuuacgaggagacaccaucgagccuuucaa

SEQ ID NO: 2431 - RNA, 37 nt, Artificial Sequence
  Description of Artificial Sequence: Synthetic oligonucleotide
auugcuccuuacgaggagacgcuuugaaaggcucgau

SEQ ID NO: 2432 - RNA, 37 nt, Artificial Sequence
  Description of Artificial Sequence: Synthetic oligonucleotide
auugcuccuuacgaggagacagggacuuggcuuugaa

SEQ ID NO: 2433 - RNA, 37 nt, Artificial Sequence
  Description of Artificial Sequence: Synthetic oligonucleotide
auugcuccuuacgaggagaccaaagccaagucccuga

SEQ ID NO: 2434 - RNA, 37 nt, Artificial Sequence
  Description of Artificial Sequence: Synthetic oligonucleotide
auugcuccuuacgaggagacaaagccaagucccugaa

SEQ ID NO: 2435 - RNA, 37 nt, Artificial Sequence
  Description of Artificial Sequence: Synthetic oligonucleotide
auugcuccuuacgaggagaccacauccuucagggacu

SEQ ID NO: 2436 - RNA, 37 nt, Artificial Sequence
  Description of Artificial Sequence: Synthetic oligonucleotide
auugcuccuuacgaggagacccaggucuuccacaucc

SEQ ID NO: 2437 - RNA, 37 nt, Artificial Sequence
  Description of Artificial Sequence: Synthetic oligonucleotide
auugcuccuuacgaggagaccccaggucuuccacauc

SEQ ID NO: 2438 - RNA, 37 nt, Artificial Sequence
  Description of Artificial Sequence: Synthetic oligonucleotide
auugcuccuuacgaggagaccucggaagacacagcug

SEQ ID NO: 2439 - RNA, 37 nt, Artificial Sequence
  Description of Artificial Sequence: Synthetic oligonucleotide
auugcuccuuacgaggagacggucccgaacagcaggg

SEQ ID NO: 2440 - RNA, 37 nt, Artificial Sequence
  Description of Artificial Sequence: Synthetic oligonucleotide
auugcuccuuacgaggagacaggucccgaacagcagg

SEQ ID NO: 2441 - RNA, 37 nt, Artificial Sequence
  Description of Artificial Sequence: Synthetic oligonucleotide
auugcuccuuacgaggagacuuuaggucccgaacagc

SEQ ID NO: 2442 - RNA, 37 nt, Artificial Sequence
  Description of Artificial Sequence: Synthetic oligonucleotide
auugcuccuuacgaggagaccuuuaggucccgaacag

SEQ ID NO: 2443 - RNA, 37 nt, Artificial Sequence
  Description of Artificial Sequence: Synthetic oligonucleotide
auugcuccuuacgaggagacgggaccuaaagaaacug

SEQ ID NO: 2444 - RNA, 37 nt, Artificial Sequence
  Description of Artificial Sequence: Synthetic oligonucleotide
auugcuccuuacgaggagacgggaaagccugggggcc

SEQ ID NO: 2445 - RNA, 37 nt, Artificial Sequence
  Description of Artificial Sequence: Synthetic oligonucleotide
auugcuccuuacgaggagacggggaaagccugggggc

SEQ ID NO: 2446 - RNA, 37 nt, Artificial Sequence
  Description of Artificial Sequence: Synthetic oligonucleotide
auugcuccuuacgaggagacccccaaacuggugcgga

SEQ ID NO: 2447 - RNA, 37 nt, Artificial Sequence
  Description of Artificial Sequence: Synthetic oligonucleotide
auugcuccuuacgaggagaccccaaacuggugcggau

SEQ ID NO: 2448 - RNA, 37 nt, Artificial Sequence
  Description of Artificial Sequence: Synthetic oligonucleotide
auugcuccuuacgaggagacuucucacucagcgcauc

SEQ ID NO: 2449 - RNA, 37 nt, Artificial Sequence
  Description of Artificial Sequence: Synthetic oligonucleotide
auugcuccuuacgaggagacagcugggggaagguggc

SEQ ID NO: 2450 - RNA, 37 nt, Artificial Sequence
  Description of Artificial Sequence: Synthetic oligonucleotide
auugcuccuuacgaggagacccccagcugaaguccuu

SEQ ID NO: 2451 - RNA, 37 nt, Artificial Sequence
  Description of Artificial Sequence: Synthetic oligonucleotide
auugcuccuuacgaggagaccaaggacuucagcuggg

SEQ ID NO: 2452 - RNA, 37 nt, Artificial Sequence
  Description of Artificial Sequence: Synthetic oligonucleotide
auugcuccuuacgaggagacccaaggacuucagcugg

SEQ ID NO: 2453 - RNA, 37 nt, Artificial Sequence
  Description of Artificial Sequence: Synthetic oligonucleotide
auugcuccuuacgaggagacaggguuuccaaggacuu

SEQ ID NO: 2454 - RNA, 37 nt, Artificial Sequence
  Description of Artificial Sequence: Synthetic oligonucleotide
auugcuccuuacgaggagacuaggcacccaggucagu

SEQ ID NO: 2455 - RNA, 37 nt, Artificial Sequence
  Description of Artificial Sequence: Synthetic oligonucleotide
auugcuccuuacgaggagacguaggcacccaggucag

SEQ ID NO: 2456 - RNA, 37 nt, Artificial Sequence
  Description of Artificial Sequence: Synthetic oligonucleotide
auugcuccuuacgaggagacgcucgcugcaucccugc

SEQ ID NO: 2457 - RNA, 37 nt, Artificial Sequence
  Description of Artificial Sequence: Synthetic oligonucleotide
auugcuccuuacgaggagacgccugagcagggaugca

SEQ ID NO: 2458 - RNA, 37 nt, Artificial Sequence
  Description of Artificial Sequence: Synthetic oligonucleotide
auugcuccuuacgaggagacuacaauaacugcaucug

SEQ ID NO: 2459 - RNA, 37 nt, Artificial Sequence
  Description of Artificial Sequence: Synthetic oligonucleotide
auugcuccuuacgaggagacgcucgugugcuuccgga

SEQ ID NO: 2460 - RNA, 37 nt, Artificial Sequence
  Description of Artificial Sequence: Synthetic oligonucleotide
auugcuccuuacgaggagaccggacauggugucccuc

SEQ ID NO: 2461 - RNA, 37 nt, Artificial Sequence
  Description of Artificial Sequence: Synthetic oligonucleotide
auugcuccuuacgaggagacacggcugccggggccca

SEQ ID NO: 2462 - RNA, 37 nt, Artificial Sequence
  Description of Artificial Sequence: Synthetic oligonucleotide
auugcuccuuacgaggagacggagguguccucaugug

SEQ ID NO: 2463 - RNA, 37 nt, Artificial Sequence
  Description of Artificial Sequence: Synthetic oligonucleotide
auugcuccuuacgaggagaccuggacacugaauggga

SEQ ID NO: 2464 - RNA, 37 nt, Artificial Sequence
  Description of Artificial Sequence: Synthetic oligonucleotide
auugcuccuuacgaggagacaguguccaggaacaccu

SEQ ID NO: 2465 - RNA, 37 nt, Artificial Sequence
  Description of Artificial Sequence: Synthetic oligonucleotide
auugcuccuuacgaggagaccagguguuccuggacac

SEQ ID NO: 2466 - RNA, 37 nt, Artificial Sequence
  Description of Artificial Sequence: Synthetic oligonucleotide
auugcuccuuacgaggagacuugcagguguuccugga

SEQ ID NO: 2467 - RNA, 37 nt, Artificial Sequence
  Description of Artificial Sequence: Synthetic oligonucleotide
auugcuccuuacgaggagacacggaucagccugagau

SEQ ID NO: 2468 - protein, 772 aa, Unknown
  Description of Unknown: CasPhi sequence
MSNTAVSTREHMSNKTTPPSPLSLLLRAHFPGLKFESQDYKIAGKKLRDGGPEAVISYLTGKGQAKLKDVKPPAKAFVIAQSRPFIEWDLVRVSRQIQEKIFGIPATKGRPKQDGLSETAFNEAVASLEVDGKSKLNEETRAAFYEVLGLDAPSLHAQAQNALIKSAISIREGVLKKVENRNEKNLSKTKRRKEAGEEATFVEEKAHDERGYLIHPPGVNQTIPGYQAVVIKSCPSDFIGLPSGCLAKESAEALTDYLPHDRMTIPKGQPGYVPEWQHPLLNRRKNRRRRDWYSASLNKPKATCSKRSGTPNRKNSRTDQIQSGRFKGAIPVLMRFQDEWVIIDIRGLLRNARYRKLLKEKSTIPDLLSLFTGDPSIDMRQGVCTFIYKAGQACSAKMVKTKNAPEILSELTKSGPVVLVSIDLGQTNPIAAKVSRVTQLSDGQLSHETLLRELLSNDSSDGKEIARYRVASDRLRDKLANLAVERLSPEHKSEILRAKNDTPALCKARVCAALGLNPEMIAWDKMTPYTEFLATAYLEKGGDRKVATLKPKNRPEMLRRDIKFKGTEGVRIEVSPEAAEAYREAQWDLQRTSPEYLRLSTWKQELTKRILNQLRHKAAKSSQCEVVVMAFEDLNIKMMHGNGKWADGGWDAFFIKKRENRWFMQAFHKSLTELGAHKGVPTIEVTPHRTSITCTKCGHCDKANRDGERFACQKCGFVAHADLEIATDNIERVALTGKPMPKPESERSGDAKKSVGARKAAFKPEEDAEAAE

SEQ ID NO: 2469 - RNA, 36 nt, Artificial Sequence
  Description of Artificial Sequence: Synthetic oligonucleotide
cuuucaagacuaauagauugcuccuuacgaggagac

SEQ ID NO: 2470 - RNA, 20 nt, Artificial Sequence
  Description of Artificial Sequence: Synthetic oligonucleotide
ucccacagauauccagaacc

SEQ ID NO: 2471 - RNA, 20 nt, Artificial Sequence
  Description of Artificial Sequence: Synthetic oligonucleotide
agagucucucagcugguaca

SEQ ID NO: 2472 - RNA, 20 nt, Artificial Sequence
  Description of Artificial Sequence: Synthetic oligonucleotide
aaguccauagaccucauguc

SEQ ID NO: 2473 - RNA, 20 nt, Artificial Sequence
  Description of Artificial Sequence: Synthetic oligonucleotide
aagagcaacagugcuguggc

SEQ ID NO: 2474 - RNA, 20 nt, Artificial Sequence
  Description of Artificial Sequence: Synthetic oligonucleotide
guugcuccaggccacagcac

SEQ ID NO: 2475 - RNA, 20 nt, Artificial Sequence
  Description of Artificial Sequence: Synthetic oligonucleotide
gcacaugcaaagucagauuu

SEQ ID NO: 2476 - RNA, 20 nt, Artificial Sequence
  Description of Artificial Sequence: Synthetic oligonucleotide
gcaugugcaaacgccuucaa

SEQ ID NO: 2477 - RNA, 20 nt, Artificial Sequence
  Description of Artificial Sequence: Synthetic oligonucleotide
cuaaaaggaaaaacagacau

SEQ ID NO: 2478 - RNA, 20 nt, Artificial Sequence
  Description of Artificial Sequence: Synthetic oligonucleotide
cucgaccagcuugacaucac

SEQ ID NO: 2479 - RNA, 20 nt, Artificial Sequence
  Description of Artificial Sequence: Synthetic oligonucleotide
auauaaguggaggcgucgcg

SEQ ID NO: 2480 - RNA, 20 nt, Artificial Sequence
  Description of Artificial Sequence: Synthetic oligonucleotide
uggccuggaggcuauccagc

SEQ ID NO: 2481 - RNA, 20 nt, Artificial Sequence
  Description of Artificial Sequence: Synthetic oligonucleotide
aaguugacuuacugaagaau

SEQ ID NO: 2482 - RNA, 20 nt, Artificial Sequence
  Description of Artificial Sequence: Synthetic oligonucleotide
agcaaggacuggucuuucua

SEQ ID NO: 2483 - RNA, 20 nt, Artificial Sequence
  Description of Artificial Sequence: Synthetic oligonucleotide
agugggggugaauucagugu

SEQ ID NO: 2484 - RNA, 20 nt, Artificial Sequence
  Description of Artificial Sequence: Synthetic oligonucleotide
ggcugugacaaagucacaug

SEQ ID NO: 2485 - RNA, 20 nt, Artificial Sequence
  Description of Artificial Sequence: Synthetic oligonucleotide
gucacagcccaagauaguua

SEQ ID NO: 2486 - RNA, 20 nt, Artificial Sequence
  Description of Artificial Sequence: Synthetic oligonucleotide
ucacagcccaagauaguuaa

SEQ ID NO: 2487 - RNA, 40 nt, Artificial Sequence
  Description of Artificial Sequence: Synthetic oligonucleotide
aggaauacaugguacacguuaggaauacaugguacacguu

SEQ ID NO: 2488 - RNA, 37 nt, Artificial Sequence
  Description of Artificial Sequence: Synthetic oligonucleotide
auugcuccuuacgaggagacagcaaggacuggucuuu

SEQ ID NO: 2489 - protein, 8 aa, Artificial Sequence
  Description of Artificial Sequence: Synthetic peptide
  MOD_RES (3)..(3): Any amino acid
  MOD_RES (4)..(4): W, F, or Y
  MOD_RES (5)..(6): Any amino acid
KRXXXXAF

SEQ ID NO: 2490 - protein, 6 aa, Artificial Sequence
  Description of Artificial Sequence: Synthetic peptide
  MOD_RES (5)..(5): K or R
  MOD_RES (6)..(6): W, F, or Y
LGKRXX
